(19) United States
(12) Patent Application Publication
(10) Pub. No.: US 2003/0125245 A1
(43) Pub. Date: Jul. 3, 2003

(54) COMPOSITIONS AND METHODS FOR THERAPY AND DIAGNOSIS OF LUNG CANCER

(76) Inventors: TONGTONG WANG, MEDINA, WA (US); CHAITANYA S. BANGUR, SEATTLE, WA (US)

Correspondence Address: SEED INTELLECTUAL PROPERTY LAW GROUP PLLC, 701 FIFTH AVE, SUITE 6300, SEATTLE, WA, 98104-7092, US

(21) Appl. No.: 09/476,300

(22) Filed: Dec. 30, 1999

Related U.S. Application Data
(63) Continuation-in-part of application No. 09/466,867, filed on Dec. 17, 1999.
Application No. 09/466,867 is a continuation-in-part of application No. 09/419,356, filed on Oct. 15, 1999, now abandoned.
Application No. 09/419,356 is a continuation-in-part of application No. 09/346,492, filed on Jun. 30, 1999, now abandoned.

(51) Int. Cl. C12Q 1/68; G01N 33/574; C12P 21/02; C12N 5/06; C07K 14/47; A61K 38/17; C07H 21/04

(52) U.S. Cl. 514/12; 435/6; 435/7.23; 435/69.1; 435/320.1; 435/325; 530/350; 536/23.1

(57) ABSTRACT

Compositions and methods for the therapy and diagnosis of cancer, such as lung cancer, are disclosed. Compositions may comprise one or more lung tumor proteins, immunogenic portions thereof, or polynucleotides that encode such portions. Alternatively, a therapeutic composition may comprise an antigen presenting cell that expresses a lung tumor protein, or a T cell that is specific for cells expressing such a protein. Such compositions may be used, for example, for the prevention and treatment of diseases such as lung cancer. Diagnostic methods based on detecting a lung tumor protein, or mRNA encoding such a protein, in a sample are also provided.

### REFERENCE TO RELATED APPLICATIONS

[0001] This application is a continuation-in-part of U.S. patent application Ser. No. ______, filed Dec. 17, 1999, which is a continuation-in-part of U.S. patent application Ser. No. 09/419,356, filed Oct. 15, 1999, which is a continuation-in-part of U.S. patent application Ser. No. 09/346,492, filed Jun. 30, 1999.

### TECHNICAL FIELD

[0002] The present invention relates generally to therapy and diagnosis of cancer, such as lung cancer. The invention is more specifically related to polypeptides comprising at least a portion of a lung tumor protein, and to polynucleotides encoding such polypeptides. Such polypeptides and polynucleotides may be used in vaccines and pharmaceutical compositions for prevention and treatment of lung cancer, and for the diagnosis and monitoring of such cancers.

### BACKGROUND OF THE INVENTION

[0003] Cancer is a significant health problem throughout the world. Although advances have been made in detection and therapy of cancer, no vaccine or other universally successful method for prevention or treatment is currently available. Current therapies, which are generally based on a combination of chemotherapy or surgery and radiation, continue to prove inadequate in many patients.

[0004] Lung cancer is the primary cause of cancer death among both men and women in the U.S., with an estimated 172,000 new cases being reported in 1994. The five-year survival rate among all lung cancer patients, regardless of the stage of disease at diagnosis, is only 13%. This contrasts with a five-year survival rate of 46% among cases detected while the disease is still localized. However, only 16% of lung cancers are discovered before the disease has spread.

[0005] Early detection is difficult since clinical symptoms are often not seen until the disease has reached an advanced stage. Currently, diagnosis is aided by the use of chest x-rays, analysis of the type of cells contained in sputum and fiberoptic examination of the bronchial passages. Treatment regimens are determined by the type and stage of the cancer, and include surgery, radiation therapy and/or chemotherapy.

[0006] In spite of considerable research into therapies for this and other cancers, lung cancer remains difficult to diagnose and treat effectively. Accordingly, there is a need in the art for improved methods for detecting and treating such cancers. The present invention fulfills these needs and further provides other related advantages.

### SUMMARY OF THE INVENTION

[0007] Briefly stated, the present invention provides compositions and methods for the diagnosis and therapy of cancer, such as lung cancer. In one aspect, the present invention provides polypeptides comprising at least a portion of a lung tumor protein, or a variant thereof. Certain portions and other variants are immunogenic, such that the ability of the variant to react with antigen-specific antisera is not substantially diminished. Within certain embodiments, the polypeptides comprise a sequence that is encoded by a polynucleotide sequence selected from the group consisting of: (a) sequences recited in SEQ ID NO:1-782, 784 and 785; (b) variants of a sequence recited in SEQ ID NO: 1-782, 784 and 785; and (c) complements of a sequence of (a) or (b).

[0008] The present invention further provides polynucleotides that encode a polypeptide as described above, or a portion thereof (such as a portion encoding at least 15 amino acid residues of a lung tumor protein), expression vectors comprising such polynucleotides and host cells transformed or transfected with such expression vectors.

[0009] Within other aspects, the present invention provides pharmaceutical compositions comprising a polypeptide or polynucleotide as described above and a physiologically acceptable carrier.

[0010] Within a related aspect of the present invention, vaccines are provided. Such vaccines comprise a polypeptide or polynucleotide as described above and an immunostimulant.

[0011] The present invention further provides pharmaceutical compositions that comprise: (a) an antibody or antigen-binding fragment thereof that specifically binds to a lung tumor protein; and (b) a physiologically acceptable carrier.

[0012] Within further aspects, the present invention provides pharmaceutical compositions comprising: (a) an antigen presenting cell that expresses a polypeptide as described above and (b) a pharmaceutically acceptable carrier or excipient. Antigen presenting cells include dendritic cells, macrophages and B cells.

[0013] Within related aspects, vaccines for prophylactic and/or therapeutic use are provided that comprise: (a) an antigen presenting cell that expresses a polypeptide as described above; and (b) an immunostimulant.

[0014] The present invention further provides fusion proteins that comprise at least one polypeptide disclosed herein, as well as polynucleotides encoding such fusion proteins.

[0015] Within related aspects, pharmaceutical compositions comprising a fusion protein, or a polynucleotide encoding such a fusion protein, in combination with a physiologically acceptable carrier are provided.

[0016] Vaccines are further provided that comprise a fusion protein, or a polynucleotide encoding a fusion protein, in combination with an immunostimulant.

[0017] Within other aspects, the present invention provides methods for inhibiting the development of a cancer in a patient, comprising administering to a patient a pharmaceutical composition or vaccine as recited above.

[0018] The present invention further provides methods for removing tumor cells from a biological sample, comprising contacting a biological sample with T cells that specifically react with a lung tumor protein, wherein the step of contacting is performed under conditions and for a time sufficient to permit the removal of cells expressing the protein from the sample.

[0019] Within related aspects, methods are provided for inhibiting the development of a cancer in a patient, comprising administering to a patient a biological sample treated as described above.

[0020] Methods are further provided for stimulating and/or expanding T cells specific for a lung tumor protein, comprising contacting T cells under conditions and for a time sufficient to permit the stimulation and/or expansion of the T cells, with one or more of: (i) a polypeptide as described above; (ii) a polynucleotide encoding such a polypeptide; and (iii) an antigen presenting cell that expresses such a polypeptide. Isolated T cell populations comprising T cells prepared as described above are also provided.

[0021] Within further aspects, the present invention provides methods for inhibiting the development of a cancer in a patient, comprising administering to a patient an effective amount of a T cell population as described above.

[0022] The present invention further provides methods for inhibiting the development of a cancer in a patient, comprising the steps of: (a) incubating CD4⁺ and/or CD8⁺ T cells isolated from a patient with one or more of: (i) a polypeptide comprising at least an immunogenic portion of a lung tumor protein; (ii) a polynucleotide encoding such a polypeptide; and (iii) an antigen-presenting cell that expressed such a polypeptide; and (b) administering to the patient an effective amount of the proliferated T cells, and thereby inhibiting the development of a cancer in the patient. Proliferated cells may, but need not, be cloned prior to administration to the patient.

[0023] Within further aspects, the present invention provides methods for determining the presence or absence of a cancer in a patient, comprising: (a) contacting a biological sample obtained from a patient with a binding agent that binds to a polypeptide as recited above; (b) detecting in the sample an amount of polypeptide that binds to the binding agent; and (c) comparing the amount of polypeptide with a predetermined cut-off value, and therefrom determining the presence or absence of a cancer in the patient. Within preferred embodiments, the binding agent is an antibody, more preferably a monoclonal antibody. The cancer may be a lung cancer.

[0024] The present invention also provides, within other aspects, methods for monitoring the progression of a cancer in a patient. Such methods comprise the steps of: (a) contacting a biological sample obtained from a patient at a first point in time with a binding agent that binds to a polypeptide as recited above; (b) detecting in the sample an amount of polypeptide that binds to the binding agent; (c) repeating steps (a) and (b) using a biological sample obtained from the patient at a subsequent point in time; and (d) comparing the amount of polypeptide detected in step (c) with the amount detected in step (b) and therefrom monitoring the progression of the cancer in the patient.

[0025] The present invention further provides, within other aspects, methods for determining the presence or absence of a cancer in a patient, comprising the steps of: (a) contacting a biological sample obtained from a patient with an oligonucleotide that hybridizes to a polynucleotide that encodes a lung tumor protein; (b) detecting in the sample a level of a polynucleotide, preferably mRNA, that hybridizes to the oligonucleotide; and (c) comparing the level of polynucleotide that hybridizes to the oligonucleotide with a predetermined cut-off value, and therefrom determining the presence or absence of a cancer in the patient. Within certain embodiments, the amount of mRNA is detected via polymerase chain reaction using, for example, at least one oligonucleotide primer that hybridizes to a polynucleotide encoding a polypeptide as recited above, or a complement of such a polynucleotide. Within other embodiments, the amount of mRNA is detected using a hybridization technique, employing an oligonucleotide probe that hybridizes to a polynucleotide that encodes a polypeptide as recited above, or a complement of such a polynucleotide.

[0026] In related aspects, methods are provided for monitoring the progression of a cancer in a patient, comprising the steps of: (a) contacting a biological sample obtained from a patient with an oligonucleotide that hybridizes to a polynucleotide that encodes a lung tumor protein; (b) detecting in the sample an amount of a polynucleotide that hybridizes to the oligonucleotide; (c) repeating steps (a) and (b) using a biological sample obtained from the patient at a subsequent point in time; and (d) comparing the amount of polynucleotide detected in step (c) with the amount detected in step (b) and therefrom monitoring the progression of the cancer in the patient.

[0027] Within further aspects, the present invention provides antibodies, such as monoclonal antibodies, that bind to a polypeptide as described above, as well as diagnostic kits comprising such antibodies. Diagnostic kits comprising one or more oligonucleotide probes or primers as described above are also provided.

[0028] These and other aspects of the present invention will become apparent upon reference to the following detailed description. All references disclosed herein are hereby incorporated by reference in their entirety as if each was incorporated individually.

[0029] Sequence Identifiers

[0030] SEQ ID NO: 1 is the determined cDNA sequence for clone #19038, also referred to as L845P.

[0031] SEQ ID NO: 2 is the determined cDNA sequence for clone #19036.

[0032] SEQ ID NO: 3 is the determined cDNA sequence for clone #19034.

[0033] SEQ ID NO: 4 is the determined cDNA sequence for clone #19033.

[0034] SEQ ID NO: 5 is the determined cDNA sequence for clone #19032.

[0035] SEQ ID NO: 6 is the determined cDNA sequence for clone #19030, also referred to as L559S.

[0036] SEQ ID NO: 7 is the determined cDNA sequence for clone #19029.

[0037] SEQ ID NO: 8 is the determined cDNA sequence for clone #19025.

[0038] SEQ ID NO: 9 is the determined cDNA sequence for clone #19023.

[0039] SEQ ID NO: 10 is the determined cDNA sequence for clone #18929.

[0040] SEQ ID NO: 11 is the determined cDNA sequence for clone #19010.

[0041] SEQ ID NO: 12 is the determined cDNA sequence for clone #19009.

[0042] SEQ ID NO: 13 is the determined cDNA sequence for clones #19005, 19007, 19016 and 19017.

[0043] SEQ ID NO: 14 is the determined cDNA sequence for clone #19004.

[0044] SEQ ID NO: 15 is the determined cDNA sequence for clones #19002 and 18965.

[0045] SEQ ID NO: 16 is the determined cDNA sequence for clone #18998.

[0046] SEQ ID NO: 17 is the determined cDNA sequence for clone #18997.

[0047] SEQ ID NO: 18 is the determined cDNA sequence for clone #18996.

[0048] SEQ ID NO: 19 is the determined cDNA sequence for clone #18995.

[0049] SEQ ID NO: 20 is the determined cDNA sequence for clone #18994, also known as L846P.

[0050] SEQ ID NO: 21 is the determined cDNA sequence for clone #18992.

[0051] SEQ ID NO: 22 is the determined cDNA sequence for clone #18991.

[0052] SEQ ID NO: 23 is the determined cDNA sequence for clone #18990, also referred to as clone #20111.

[0053] SEQ ID NO: 24 is the determined cDNA sequence for clone #18987.

[0054] SEQ ID NO: 25 is the determined cDNA sequence for clone #18985, also referred as L839P.

[0055] SEQ ID NO: 26 is the determined cDNA sequence for clone #18984, also referred to as L847P.

[0056] SEQ ID NO: 27 is the determined cDNA sequence for clone #18983.

[0057] SEQ ID NO: 28 is the determined cDNA sequence for clones #18976 and 18980.

[0058] SEQ ID NO: 29 is the determined cDNA sequence for clone #18975.

[0059] SEQ ID NO: 30 is the determined cDNA sequence for clone #18974.

[0060] SEQ ID NO: 31 is the determined cDNA sequence for clone #18973.

[0061] SEQ ID NO: 32 is the determined cDNA sequence for clone #18972.

[0062] SEQ ID NO: 33 is the determined cDNA sequence for clone #18971, also referred to as L801P.

[0063] SEQ ID NO: 34 is the determined cDNA sequence for clone #18970.

[0064] SEQ ID NO: 35 is the determined cDNA sequence for clone #18966.

[0065] SEQ ID NO: 36 is the determined cDNA sequence for clones #18964, 18968 and 19039.

[0066] SEQ ID NO: 37 is the determined cDNA sequence for clone #18960.

[0067] SEQ ID NO: 38 is the determined cDNA sequence for clone #18959.

[0068] SEQ ID NO: 39 is the determined cDNA sequence for clones #18958 and 18982.

[0069] SEQ ID NO: 40 is the determined cDNA sequence for clones #18956 and 19015.

[0070] SEQ ID NO: 41 is the determined cDNA sequence for clone #18954, also referred to L848P.

[0071] SEQ ID NO: 42 is the determined cDNA sequence for clone #18951.

[0072] SEQ ID NO: 43 is the determined cDNA sequence for clone #18950.

[0073] SEQ ID NO: 44 is the determined cDNA sequence for clones #18949 and 19024, also referred to as L844P.

[0074] SEQ ID NO: 45 is the determined cDNA sequence for clone #18948.

[0075] SEQ ID NO: 46 is the determined cDNA sequence for clone #18947, also referred to as L840P.

[0076] SEQ ID NO: 47 is the determined cDNA sequence for clones #18946, 18953, 18969 and 19027.

[0077] SEQ ID NO: 48 is the determined cDNA sequence for clone #18942.

[0078] SEQ ID NO: 49 is the determined cDNA sequence for clone #18940, 18962, 18963, 19006, 19008, 19000, and 19031.

[0079] SEQ ID NO: 50 is the determined cDNA sequence for clone #18939.

[0080] SEQ ID NO: 51 is the determined cDNA sequence for clones #18938 and 18952.

[0081] SEQ ID NO: 52 is the determined cDNA sequence for clone #18938.

[0082] SEQ ID NO: 53 is the determined cDNA sequence for clone #18937.

[0083] SEQ ID NO: 54 is the determined cDNA sequence for clones #18934, 18935, 18993 and 19022, also referred to as L548S.

[0084] SEQ ID NO: 55 is the determined cDNA sequence for clone #18932.

[0085] SEQ ID NO: 56 is the determined cDNA sequence for clones #18931 and 18936.

[0086] SEQ ID NO: 57 is the determined cDNA sequence for clone #18930.

[0087] SEQ ID NO: 58 is the determined cDNA sequence for clone #19014, also referred to as L773P.

[0088] SEQ ID NO: 59 is the determined cDNA sequence for clone #19127.

[0089] SEQ ID NO: 60 is the determined cDNA sequence for clones #19057 and 19064.

[0090] SEQ ID NO: 61 is the determined cDNA sequence for clone #19122.

[0091] SEQ ID NO: 62 is the determined cDNA sequence for clones #19120 and 18121.

[0092] SEQ ID NO: 63 is the determined cDNA sequence for clone #19118.

[0093] SEQ ID NO: 64 is the determined cDNA sequence for clone #19117.

[0094] SEQ ID NO: 65 is the determined cDNA sequence for clone #19116.

[0095] SEQ ID NO: 66 is the determined cDNA sequence for clone #19114.

[0096] SEQ ID NO: 67 is the determined cDNA sequence for clone #19112, also known as L561S.

[0097] SEQ ID NO: 68 is the determined cDNA sequence for clone #19110.

[0098] SEQ ID NO: 69 is the determined cDNA sequence for clone #19107, also referred to as L552S.

[0099] SEQ ID NO: 70 is the determined cDNA sequence for clone #19106, also referred to as L547S.

[0100] SEQ ID NO: 71 is the determined cDNA sequence for clones #19105 and 19111.

[0101] SEQ ID NO: 72 is the determined cDNA sequence for clone #19099.

[0102] SEQ ID NO: 73 is the determined cDNA sequence for clones #19095, 19104 and 19125, also referred to as L549S.

[0103] SEQ ID NO: 74 is the determined cDNA sequence for clone #19094.

[0104] SEQ ID NO: 75 is the determined cDNA sequence for clones #19089 and 19101.

[0105] SEQ ID NO: 76 is the determined cDNA sequence for clone #19088.

[0106] SEQ ID NO: 77 is the determined cDNA sequence for clones #19087, 19092, 19096, 19100 and 19119.

[0107] SEQ ID NO: 78 is the determined cDNA sequence for clone #19086.

[0108] SEQ ID NO: 79 is the determined cDNA sequence for clone #19085, also referred to as L550S.

[0109] SEQ ID NO: 80 is the determined cDNA sequence for clone #19084, also referred to as clone #19079.

[0110] SEQ ID NO: 81 is the determined cDNA sequence for clone #19082.

[0111] SEQ ID NO: 82 is the determined cDNA sequence for clone #19080.

[0112] SEQ ID NO: 83 is the determined cDNA sequence for clone #19077.

[0113] SEQ ID NO: 84 is the determined cDNA sequence for clone #19076, also referred to as L551S.

[0114] SEQ ID NO: 85 is the determined cDNA sequence for clone #19074, also referred to as clone #20102.

[0115] SEQ ID NO: 86 is the determined cDNA sequence for clone #19073, also referred to as L560S.

[0116] SEQ ID NO: 87 is the determined cDNA sequence for clones #19072 and 19115.

[0117] SEQ ID NO: 88 is the determined cDNA sequence for clone #19071.

[0118] SEQ ID NO: 89 is the determined cDNA sequence for clone #19070.

[0119] SEQ ID NO: 90 is the determined cDNA sequence for clone #19069.

[0120] SEQ ID NO: 91 is the determined cDNA sequence for clone #19068, also referred to L563S.

[0121] SEQ ID NO: 92 is the determined cDNA sequence for clone #19066.

[0122] SEQ ID NO: 93 is the determined cDNA sequence for clone #19065.

[0123] SEQ ID NO: 94 is the determined cDNA sequence for clone #19063.

[0124] SEQ ID NO: 95 is the determined cDNA sequence for clones #19061, 19081, 19108 and 19109.

[0125] SEQ ID NO: 96 is the determined cDNA sequence for clones #19060, 19067 and 19083, also referred to as L548S.

[0126] SEQ ID NO: 97 is the determined cDNA sequence for clones #19059 and 19062.SEQ ID NO: 98 is the determined cDNA sequence for clone #19058.

[0127] SEQ ID NO: 99 is the determined cDNA sequence for clone #19124.

[0128] SEQ ID NO: 100 is the determined cDNA sequence for clone #18929.

[0129] SEQ ID NO: 101 is the determined cDNA sequence for clone #18422.

[0130] SEQ ID NO: 102 is the determined cDNA sequence for clone #18425.

[0131] SEQ ID NO: 103 is the determined cDNA sequence for clone #18431.

[0132] SEQ ID NO: 104 is the determined cDNA sequence for clone #18433.

[0133] SEQ ID NO: 105 is the determined cDNA sequence for clone #18444.

[0134] SEQ ID NO: 106 is the determined cDNA sequence for clone #18449.

[0135] SEQ ID NO: 107 is the determined cDNA sequence for clone #18451.

[0136] SEQ ID NO: 108 is the determined cDNA sequence for clone #18452.

[0137] SEQ ID NO: 109 is the determined cDNA sequence for clone #18455.

[0138] SEQ ID NO: 110 is the determined cDNA sequence for clone #18457.

[0139] SEQ ID NO: 111 is the determined cDNA sequence for clone #18466.

[0140] SEQ ID NO: 112 is the determined cDNA sequence for clone #18468.

[0141] SEQ ID NO: 113 is the determined cDNA sequence for clone #18471.

[0142] SEQ ID NO: 114 is the determined cDNA sequence for clone #18475.

[0143] SEQ ID NO: 115 is the determined cDNA sequence for clone #18476.

[0144] SEQ ID NO: 116 is the determined cDNA sequence for clone #18477.

[0145] SEQ ID NO: 117 is the determined cDNA sequence for clone #20631.

[0146] SEQ ID NO: 118 is the determined cDNA sequence for clone #20634.

[0147] SEQ ID NO: 119 is the determined cDNA sequence for clone #20635.

[0148] SEQ ID NO: 120 is the determined cDNA sequence for clone #20637.

[0149] SEQ ID NO: 121 is the determined cDNA sequence for clone #20638.

[0150] SEQ ID NO: 122 is the determined cDNA sequence for clone #20643.

[0151] SEQ ID NO: 123 is the determined cDNA sequence for clone #20652.

[0152] SEQ ID NO: 124 is the determined cDNA sequence for clone #20653.

[0153] SEQ ID NO: 125 is the determined cDNA sequence for clone #20657.

[0154] SEQ ID NO: 126 is the determined cDNA sequence for clone #20658.

[0155] SEQ ID NO: 127 is the determined cDNA sequence for clone #20660.

[0156] SEQ ID NO: 128 is the determined cDNA sequence for clone #20661.

[0157] SEQ ID NO: 129 is the determined cDNA sequence for clone #20663.

[0158] SEQ ID NO: 130 is the determined cDNA sequence for clone #20665.

[0159] SEQ ID NO: 131 is the determined cDNA sequence for clone #20670.

[0160] SEQ ID NO: 132 is the determined cDNA sequence for clone #20671.

[0161] SEQ ID NO: 133 is the determined cDNA sequence for clone #20672.

[0162] SEQ ID NO: 134 is the determined cDNA sequence for clone #20675.

[0163] SEQ ID NO: 135 is the determined cDNA sequence for clone #20679.

[0164] SEQ ID NO: 136 is the determined cDNA sequence for clone #20681.

[0165] SEQ ID NO: 137 is the determined cDNA sequence for clone #20682.

[0166] SEQ ID NO: 138 is the determined cDNA sequence for clone #20684.

[0167] SEQ ID NO: 139 is the determined cDNA sequence for clone #20685.

[0168] SEQ ID NO: 140 is the determined cDNA sequence for clone #20689.

[0169] SEQ ID NO: 141 is the determined cDNA sequence for clone #20699.

[0170] SEQ ID NO: 142 is the determined cDNA sequence for clone #20701.

[0171] SEQ ID NO: 143 is the determined cDNA sequence for clone #20702.

[0172] SEQ ID NO: 144 is the determined cDNA sequence for clone #20708.

[0173] SEQ ID NO: 145 is the determined cDNA sequence for clone #20715.

[0174] SEQ ID NO: 146 is the determined cDNA sequence for clone #20716.

[0175] SEQ ID NO: 147 is the determined cDNA sequence for clone #20719.

[0176] SEQ ID NO: 148 is the determined cDNA sequence for clone #19129.

[0177] SEQ ID NO: 149 is the determined cDNA sequence for clone #19131.1.

[0178] SEQ ID NO: 150 is the determined cDNA sequence for clone #19132.2.

[0179] SEQ ID NO: 151 is the determined cDNA sequence for clone #19133.

[0180] SEQ ID NO: 152 is the determined cDNA sequence for clone #19134.2.

[0181] SEQ ID NO: 153 is the determined cDNA sequence for clone #19135.2.

[0182] SEQ ID NO: 154 is the determined cDNA sequence for clone #19137.

[0183] SEQ ID NO: 155 is a first determined cDNA sequence for clone #19138.1.

[0184] SEQ ID NO: 156 is a second determined cDNA sequence for clone #19138.2.

[0185] SEQ ID NO: 157 is the determined cDNA sequence for clone #19139.

[0186] SEQ ID NO: 158 is a first determined cDNA sequence for clone #19140.1.

[0187] SEQ ID NO: 159 is a second determined cDNA sequence for clone #19140.2.

[0188] SEQ ID NO: 160 is the determined cDNA sequence for clone #19141.

[0189] SEQ ID NO: 161 is the determined cDNA sequence for clone #19143.

[0190] SEQ ID NO: 162 is the determined cDNA sequence for clone #19144.

[0191] SEQ ID NO: 163 is a first determined cDNA sequence for clone #19145.1.

[0192] SEQ ID NO: 164 is a second determined cDNA sequence for clone #19145.2.

[0193] SEQ ID NO: 165 is the determined cDNA sequence for clone #19146.

[0194] SEQ ID NO: 166 is the determined cDNA sequence for clone 19149.1.

[0195] SEQ ID NO: 167 is the determined cDNA sequence for clone #19152.

[0196] SEQ ID NO: 168 is a first determined cDNA sequence for clone #19153.1.

[0197] SEQ ID NO: 169 is a second determined cDNA sequence for clone #19153.2.

[0198] SEQ ID NO: 170 is the determined cDNA sequence for clone #19155.

[0199] SEQ ID NO: 171 is the determined cDNA sequence for clone #19157.

[0200] SEQ ID NO: 172 is the determined cDNA sequence for clone #19159.

[0201] SEQ ID NO: 173 is the determined cDNA sequence for clone #19160.

[0202] SEQ ID NO: 174 is a first determined cDNA sequence for clone #19161.1.

[0203] SEQ ID NO: 175 is a second determined cDNA sequence for clone #19161.2.

[0204] SEQ ID NO: 176 is the determined cDNA sequence for clone #19162.1.

[0205] SEQ ID NO: 177 is the determined cDNA sequence for clone #19166.

[0206] SEQ ID NO: 178 is the determined cDNA sequence for clone #19169.

[0207] SEQ ID NO: 179 is the determined cDNA sequence for clone #19171.

[0208] SEQ ID NO: 180 is a first determined cDNA sequence for clone #19173.1.

[0209] SEQ ID NO: 181 is a second determined cDNA sequence for clone #19173.2.

[0210] SEQ ID NO: 182 is the determined cDNA sequence for clone #19174.1.

[0211] SEQ ID NO: 183 is the determined cDNA sequence for clone #19175.

[0212] SEQ ID NO: 184 is the determined cDNA sequence for clone #19177.

[0213] SEQ ID NO: 185 is the determined cDNA sequence for clone #19178.

[0214] SEQ ID NO: 186 is the determined cDNA sequence for clone #19179.1.

[0215] SEQ ID NO: 187 is the determined cDNA sequence for clone #19179.2.

[0216] SEQ ID NO: 188 is the determined cDNA sequence for clone #19180.

[0217] SEQ ID NO: 189 is a first determined cDNA sequence for clone #19182.1.

[0218] SEQ ID NO: 190 is a second determined cDNA sequence for clone #19182.2.

[0219] SEQ ID NO: 191 is the determined cDNA sequence for clone #19183.1.

[0220] SEQ ID NO: 192 is the determined cDNA sequence for clone #19185.1.

[0221] SEQ ID NO: 193 is the determined cDNA sequence for clone #19187.

[0222] SEQ ID NO: 194 is the determined cDNA sequence for clone #19188.

[0223] SEQ ID NO: 195 is the determined cDNA sequence for clone #19190.

[0224] SEQ ID NO: 196 is the determined cDNA sequence for clone #19191.

[0225] SEQ ID NO: 197 is the determined cDNA sequence for clone #19192.

[0226] SEQ ID NO: 198 is the determined cDNA sequence for clone #19193.

[0227] SEQ ID NO: 199 is a first determined cDNA sequence for clone #19194.1.

[0228] SEQ ID NO: 200 is a second determined cDNA sequence for clone #19194.2.

[0229] SEQ ID NO: 201 is the determined cDNA sequence for clone #19197.

[0230] SEQ ID NO: 202 is a first determined cDNA sequence for clone #19200.1.

[0231] SEQ ID NO: 203 is a second determined cDNA sequence for clone #19200.2.

[0232] SEQ ID NO: 204 is the determined cDNA sequence for clone #19202.

[0233] SEQ ID NO: 205 is a first determined cDNA sequence for clone #19204.1.

[0234] SEQ ID NO: 206 is a second determined cDNA sequence for clone #19204.2.

[0235] SEQ ID NO: 207 is the determined cDNA sequence for clone #19205.

[0236] SEQ ID NO: 208 is a first determined cDNA sequence for clone #19206.1.

[0237] SEQ ID NO: 209 is a second determined cDNA sequence for clone #19206.2.

[0238] SEQ ID NO: 210 is the determined cDNA sequence for clone #19207.

[0239] SEQ ID NO: 211 is the determined cDNA sequence for clone #19208.

[0240] SEQ ID NO: 212 is a first determined cDNA sequence for clone #19211.1.

[0241] SEQ ID NO: 213 is a second determined cDNA sequence for clone #19211.2.

[0242] SEQ ID NO: 214 is a first determined cDNA sequence for clone #19214.1.

[0243] SEQ ID NO: 215 is a second determined cDNA sequence for clone #19214.2.

[0244] SEQ ID NO: 216 is the determined cDNA sequence for clone #19215.

[0245] SEQ ID NO: 217 is a first determined cDNA sequence for clone #19217.2.

[0246] SEQ ID NO: 218 is a second determined cDNA sequence for clone #19217.2.

[0247] SEQ ID NO: 219 is a first determined cDNA sequence for clone #19218.1.

[0248] SEQ ID NO: 220 is a second determined cDNA sequence for clone #19218.2.

[0249] SEQ ID NO: 221 is a first determined cDNA sequence for clone #19220.1.

[0250] SEQ ID NO: 222 is a second determined cDNA sequence for clone #19220.2.

[0251] SEQ ID NO: 223 is the determined cDNA sequence for clone #22015.

[0252] SEQ ID NO: 224 is the determined cDNA sequence for clone #22017.

[0253] SEQ ID NO: 225 is the determined cDNA sequence for clone #22019.

[0254] SEQ ID NO: 226 is the determined cDNA sequence for clone #22020.

[0255] SEQ ID NO: 227 is the determined cDNA sequence for clone #22023.

[0256] SEQ ID NO: 228 is the determined cDNA sequence for clone #22026.

[0257] SEQ ID NO: 229 is the determined cDNA sequence for clone #22027.

[0258] SEQ ID NO: 230 is the determined cDNA sequence for clone #22028.

[0259] SEQ ID NO: 231 is the determined cDNA sequence for clone #22032.

[0260] SEQ ID NO: 232 is the determined cDNA sequence for clone #22037.

[0261] SEQ ID NO: 233 is the determined cDNA sequence for clone #22045.

[0262] SEQ ID NO: 234 is the determined cDNA sequence for clone #22048.

[0263] SEQ ID NO: 235 is the determined cDNA sequence for clone #22050.

[0264] SEQ ID NO: 236 is the determined cDNA sequence for clone #22052.

[0265] SEQ ID NO: 237 is the determined cDNA sequence for clone #22053.

[0266] SEQ ID NO: 238 is the determined cDNA sequence for clone #22057.

[0267] SEQ ID NO: 239 is the determined cDNA sequence for clone #22066.

[0268] SEQ ID NO: 240 is the determined cDNA sequence for clone #22077.

[0269] SEQ ID NO: 241 is the determined cDNA sequence for clone #22085.

[0270] SEQ ID NO: 242 is the determined cDNA sequence for clone #22105.

[0271] SEQ ID NO: 243 is the determined cDNA sequence for clone #22108.

[0272] SEQ ID NO: 244 is the determined cDNA sequence for clone #22109.

[0273] SEQ ID NO: 245 is the determined cDNA sequence for clone #24842.

[0274] SEQ ID NO: 246 is the determined cDNA sequence for clone #24843.

[0275] SEQ ID NO: 247 is the determined cDNA sequence for clone #24845.

[0276] SEQ ID NO: 248 is the determined cDNA sequence for clone #24851.

[0277] SEQ ID NO: 249 is the determined cDNA sequence for clone #24852.

[0278] SEQ ID NO: 250 is the determined cDNA sequence for clone #24853.

[0279] SEQ ID NO: 251 is the determined cDNA sequence for clone #24854.

[0280] SEQ ID NO: 252 is the determined cDNA sequence for clone #24855.

[0281] SEQ ID NO: 253 is the determined cDNA sequence for clone #24860.

[0282] SEQ ID NO: 254 is the determined cDNA sequence for clone #24864.

[0283] SEQ ID NO: 255 is the determined cDNA sequence for clone #24866.

[0284] SEQ ID NO: 256 is the determined cDNA sequence for clone #24867.

[0285] SEQ ID NO: 257 is the determined cDNA sequence for clone #24868.

[0286] SEQ ID NO: 258 is the determined cDNA sequence for clone #24869.

[0287] SEQ ID NO: 259 is the determined cDNA sequence for clone #24870.

[0288] SEQ ID NO: 260 is the determined cDNA sequence for clone #24872.

[0289] SEQ ID NO: 261 is the determined cDNA sequence for clone #24873.

[0290] SEQ ID NO: 262 is the determined cDNA sequence for clone #24875.

[0291] SEQ ID NO: 263 is the determined cDNA sequence for clone #24882.

[0292] SEQ ID NO: 264 is the determined cDNA sequence for clone #24885.

[0293] SEQ ID NO: 265 is the determined cDNA sequence for clone #24886.

[0294] SEQ ID NO: 266 is the determined cDNA sequence for clone #24887.

[0295] SEQ ID NO: 267 is the determined cDNA sequence for clone #24888.

[0296] SEQ ID NO: 268 is the determined cDNA sequence for clone #24890.

[0297] SEQ ID NO: 269 is the determined cDNA sequence for clone #24896.

[0298] SEQ ID NO: 270 is the determined cDNA sequence for clone #24897.

[0299] SEQ ID NO: 271 is the determined cDNA sequence for clone #24899.

[0300] SEQ ID NO: 272 is the determined cDNA sequence for clone #24901.

[0301] SEQ ID NO: 273 is the determined cDNA sequence for clone #24902.

[0302] SEQ ID NO: 274 is the determined cDNA sequence for clone #24906.

[0303] SEQ ID NO: 275 is the determined cDNA sequence for clone #24912.

[0304] SEQ ID NO: 276 is the determined cDNA sequence for clone #24913.

[0305] SEQ ID NO: 277 is the determined cDNA sequence for clone #24920.

[0306] SEQ ID NO: 278 is the determined cDNA sequence for clone #24927.

[0307] SEQ ID NO: 279 is the determined cDNA sequence for clone #24930.

[0308] SEQ ID NO: 280 is the determined cDNA sequence for clone #26938.

[0309] SEQ ID NO: 281 is the determined cDNA sequence for clone #26939.

[0310] SEQ ID NO: 282 is the determined cDNA sequence for clone #26943.

[0311] SEQ ID NO: 283 is the determined cDNA sequence for clone #26948.

[0312] SEQ ID NO: 284 is the determined cDNA sequence for clone #26951.

[0313] SEQ ID NO: 285 is the determined cDNA sequence for clone #26955.

[0314] SEQ ID NO: 286 is the determined cDNA sequence for clone #26956.

[0315] SEQ ID NO: 287 is the determined cDNA sequence for clone #26959.

[0316] SEQ ID NO: 288 is the determined cDNA sequence for clone #26961.

[0317] SEQ ID NO: 289 is the determined cDNA sequence for clone #26962.

[0318] SEQ ID NO: 290 is the determined cDNA sequence for clone #26964.

[0319] SEQ ID NO: 291 is the determined cDNA sequence for clone #26966.

[0320] SEQ ID NO: 292 is the determined cDNA sequence for clone #26968.

[0321] SEQ ID NO: 293 is the determined cDNA sequence for clone #26972.

[0322] SEQ ID NO: 294 is the determined cDNA sequence for clone #26973.

[0323] SEQ ID NO: 295 is the determined cDNA sequence for clone #26974.

[0324] SEQ ID NO: 296 is the determined cDNA sequence for clone #26976.

[0325] SEQ ID NO: 297 is the determined cDNA sequence for clone #26977.

[0326] SEQ ID NO: 298 is the determined cDNA sequence for clone #26979.

[0327] SEQ ID NO: 299 is the determined cDNA sequence for clone #26980.

[0328] SEQ ID NO: 300 is the determined cDNA sequence for clone #26981.

[0329] SEQ ID NO: 301 is the determined cDNA sequence for clone #26984.

[0330] SEQ ID NO: 302 is the determined cDNA sequence for clone #26985.

[0331] SEQ ID NO: 303 is the determined cDNA sequence for clone #26986.

[0332] SEQ ID NO: 304 is the determined cDNA sequence for clone #26993.

[0333] SEQ ID NO: 305 is the determined cDNA sequence for clone #26994.

[0334] SEQ ID NO: 306 is the determined cDNA sequence for clone #26995.

[0335] SEQ ID NO: 307 is the determined cDNA sequence for clone #27003.

[0336] SEQ ID NO: 308 is the determined cDNA sequence for clone #27005.

[0337] SEQ ID NO: 309 is the determined cDNA sequence for clone #27010.

[0338] SEQ ID NO: 310 is the determined cDNA sequence for clone #27011.

[0339] SEQ ID NO: 311 is the determined cDNA sequence for clone #27013.

[0340] SEQ ID NO: 312 is the determined cDNA sequence for clone #27016

[0341] SEQ ID NO: 313 is the determined cDNA sequence for clone #27017.

[0342] SEQ ID NO: 314 is the determined cDNA sequence for clone #27019.

[0343] SEQ ID NO: 315 is the determined cDNA sequence for clone #27028.

[0344] SEQ ID NO: 316 is the full-length cDNA sequence for clone #19060.

[0345] SEQ ID NO: 317 is the full-length cDNA sequence for clone #18964.

[0346] SEQ ID NO: 318 is the full-length cDNA sequence for clone #18929.

[0347] SEQ ID NO: 319 is the full-length cDNA sequence for clone #18991.

[0348] SEQ ID NO: 320 is the full-length cDNA sequence for clone #18996.

[0349] SEQ ID NO: 321 is the full-length cDNA sequence for clone #18966.

[0350] SEQ ID NO: 322 is the full-length cDNA sequence for clone #18951.

[0351] SEQ ID NO: 323 is the full-length cDNA sequence for clone #18973 (also known as L516S).

[0352] SEQ ID NO: 324 is the amino acid sequence for clone #19060.

[0353] SEQ ID NO: 325 is the amino acid sequence for clone #19063.

[0354] SEQ ID NO: 326 is the amino acid sequence for clone #19077.

[0355] SEQ ID NO: 327 is the amino acid sequence for clone #19110.

[0356] SEQ ID NO: 328 is the amino acid sequence for clone #19122.

[0357] SEQ ID NO: 329 is the amino acid sequence for clone #19118.

[0358] SEQ ID NO: 330 is the amino acid sequence for clone #19080.

[0359] SEQ ID NO: 331 is the amino acid sequence for clone #19127.

[0360] SEQ ID NO: 332 is the amino acid sequence for clone #19117.

[0361] SEQ ID NO: 333 is the amino acid sequence for clone #19095, also referred to L549S.

[0362] SEQ ID NO: 334 is the amino acid sequence for clone #18964.

[0363] SEQ ID NO: 335 is the amino acid sequence for clone #18929.

[0364] SEQ ID NO: 336 is the amino acid sequence for clone #18991.

[0365] SEQ ID NO: 337 is the amino acid sequence for clone #18996.

[0366] SEQ ID NO: 338 is the amino acid sequence for clone #18966.

[0367] SEQ ID NO: 339 is the amino acid sequence for clone #18951.

[0368] SEQ ID NO: 340 is the amino acid sequence for clone #18973.

[0369] SEQ ID NO: 341 is the determined cDNA sequence for clone 26461.

[0370] SEQ ID NO: 342 is the determined cDNA sequence for clone 26462.

[0371] SEQ ID NO: 343 is the determined cDNA sequence for clone 26463.

[0372] SEQ ID NO: 344 is the determined cDNA sequence for clone 26464.

[0373] SEQ ID NO: 345 is the determined cDNA sequence for clone 26465.

[0374] SEQ ID NO: 346 is the determined cDNA sequence for clone 26466.

[0375] SEQ ID NO: 347 is the determined cDNA sequence for clone 26467.

[0376] SEQ ID NO: 348 is the determined cDNA sequence for clone 26468.

[0377] SEQ ID NO: 349 is the determined cDNA sequence for clone 26469.

[0378] SEQ ID NO: 350 is the determined cDNA sequence for clone 26470.

[0379] SEQ ID NO: 351 is the determined cDNA sequence for clone 26471.

[0380] SEQ ID NO: 352 is the determined cDNA sequence for clone 26472.

[0381] SEQ ID NO: 353 is the determined cDNA sequence for clone 26474.

[0382] SEQ ID NO: 354 is the determined cDNA sequence for clone 26475.

[0383] SEQ ID NO: 355 is the determined cDNA sequence for clone 26476.

[0384] SEQ ID NO: 356 is the determined cDNA sequence for clone 26477.

[0385] SEQ ID NO: 357 is the determined cDNA sequence for clone 26478.

[0386] SEQ ID NO: 358 is the determined cDNA sequence for clone 26479.

[0387] SEQ ID NO: 359 is the determined cDNA sequence for clone 26480.

[0388] SEQ ID NO: 360 is the determined cDNA sequence for clone 26481.

[0389] SEQ ID NO: 361 is the determined cDNA sequence for clone 26482

[0390] SEQ ID NO: 362 is the determined cDNA sequence for clone 26483.

[0391] SEQ ID NO: 363 is the determined cDNA sequence for clone 26484.

[0392] SEQ ID NO: 364 is the determined cDNA sequence for clone 26485.

[0393] SEQ ID NO: 365 is the determined cDNA sequence for clone 26486.

[0394] SEQ ID NO: 366 is the determined cDNA sequence for clone 26487.

[0395] SEQ ID NO: 367 is the determined cDNA sequence for clone 26488.

[0396] SEQ ID NO: 368 is the determined cDNA sequence for clone 26489.

[0397] SEQ ID NO: 369 is the determined cDNA sequence for clone 26490.

[0398] SEQ ID NO: 370 is the determined cDNA sequence for clone 26491.

[0399] SEQ ID NO: 371 is the determined cDNA sequence for clone 26492.

[0400] SEQ ID NO: 372 is the determined cDNA sequence for clone 26493.

[0401] SEQ ID NO: 373 is the determined cDNA sequence for clone 26494.

[0402] SEQ ID NO: 374 is the determined cDNA sequence for clone 26495.

[0403] SEQ ID NO: 375 is the determined cDNA sequence for clone 26496.

[0404] SEQ ID NO: 376 is the determined cDNA sequence for clone 26497.

[0405] SEQ ID NO: 377 is the determined cDNA sequence for clone 26498.

[0406] SEQ ID NO: 378 is the determined cDNA sequence for clone 26499.

[0407] SEQ ID NO: 379 is the determined cDNA sequence for clone 26500.

[0408] SEQ ID NO: 380 is the determined cDNA sequence for clone 26501.

[0409] SEQ ID NO: 381 is the determined cDNA sequence for clone 26502.

[0410] SEQ ID NO: 382 is the determined cDNA sequence for clone 26503.

[0411] SEQ ID NO: 383 is the determined cDNA sequence for clone 26504.

[0412] SEQ ID NO: 384 is the determined cDNA sequence for clone 26505.

[0413] SEQ ID NO: 385 is the determined cDNA sequence for clone 26506.

[0414] SEQ ID NO: 386 is the determined cDNA sequence for clone 26507.

[0415] SEQ ID NO: 387 is the determined cDNA sequence for clone 26508.

[0416] SEQ ID NO: 388 is the determined cDNA sequence for clone 26509.

[0417] SEQ ID NO: 389 is the determined cDNA sequence for clone 26511.

[0418] SEQ ID NO: 390 is the determined cDNA sequence for clone 26513.

[0419] SEQ ID NO: 391 is the determined cDNA sequence for clone 26514.

[0420] SEQ ID NO: 392 is the determined cDNA sequence for clone 26515.

[0421] SEQ ID NO: 393 is the determined cDNA sequence for clone 26516.

[0422] SEQ ID NO: 394 is the determined cDNA sequence for clone 26517.

[0423] SEQ ID NO: 395 is the determined cDNA sequence for clone 26518.

[0424] SEQ ID NO: 396 is the determined cDNA sequence for clone 26519.

[0425] SEQ ID NO: 397 is the determined cDNA sequence for clone 26520.

[0426] SEQ ID NO: 398 is the determined cDNA sequence for clone 26521.

[0427] SEQ ID NO: 399 is the determined cDNA sequence for clone 26522.

[0428] SEQ ID NO: 400 is the determined cDNA sequence for clone 26523.

[0429] SEQ ID NO: 401 is the determined cDNA sequence for clone 26524.

[0430] SEQ ID NO: 402 is the determined cDNA sequence for clone 26526.

[0431] SEQ ID NO: 403 is the determined cDNA sequence for clone 26527.

[0432] SEQ ID NO: 404 is the determined cDNA sequence for clone 26528.

[0433] SEQ ID NO: 405 is the determined cDNA sequence for clone 26529.

[0434] SEQ ID NO: 406 is the determined cDNA sequence for clone 26530.

[0435] SEQ ID NO: 407 is the determined cDNA sequence for clone 26532.

[0436] SEQ ID NO: 408 is the determined cDNA sequence for clone 26533.

[0437] SEQ ID NO: 409 is the determined cDNA sequence for clone 26534.

[0438] SEQ ID NO: 410 is the determined cDNA sequence for clone 26535.

[0439] SEQ ID NO: 411 is the determined cDNA sequence for clone 26536.

[0440] SEQ ID NO: 412 is the determined cDNA sequence for clone 26537.

[0441] SEQ ID NO: 413 is the determined cDNA sequence for clone 26538.

[0442] SEQ ID NO: 414 is the determined cDNA sequence for clone 26540.

[0443] SEQ ID NO: 415 is the determined cDNA sequence for clone 26541.

[0444] SEQ ID NO: 416 is the determined cDNA sequence for clone 26542.

[0445] SEQ ID NO: 417 is the determined cDNA sequence for clone 26543.

[0446] SEQ ID NO: 418 is the determined cDNA sequence for clone 26544.

[0447] SEQ ID NO: 419 is the determined cDNA sequence for clone 26546.

[0448] SEQ ID NO: 420 is the determined cDNA sequence for clone 26547.

[0449] SEQ ID NO: 421 is the determined cDNA sequence for clone 26548.

[0450] SEQ ID NO: 422 is the determined cDNA sequence for clone 26549.

[0451] SEQ ID NO: 423 is the determined cDNA sequence for clone 26550.

[0452] SEQ ID NO: 424 is the determined cDNA sequence for clone 26551.

[0453] SEQ ID NO: 425 is the determined cDNA sequence for clone 26552.

[0454] SEQ ID NO: 426 is the determined cDNA sequence for clone 26553.

[0455] SEQ ID NO: 427 is the determined cDNA sequence for clone 26554.

[0456] SEQ ID NO: 428 is the determined cDNA sequence for clone 26556.

[0457] SEQ ID NO: 429 is the determined cDNA sequence for clone 26557.

[0458] SEQ ID NO: 430 is the determined cDNA sequence for clone 27631.

[0459] SEQ ID NO: 431 is the determined cDNA sequence for clone 27632.

[0460] SEQ ID NO: 432 is the determined cDNA sequence for clone 27633.

[0461] SEQ ID NO: 433 is the determined cDNA sequence for clone 27635.

[0462] SEQ ID NO: 434 is the determined cDNA sequence for clone 27636.

[0463] SEQ ID NO: 435 is the determined cDNA sequence for clone 27637.

[0464] SEQ ID NO: 436 is the determined cDNA sequence for clone 27638.

[0465] SEQ ID NO: 437 is the determined cDNA sequence for clone 27639.

[0466] SEQ ID NO: 438 is the determined cDNA sequence for clone 27640.

[0467] SEQ ID NO: 439 is the determined cDNA sequence for clone 27641.

[0468] SEQ ID NO: 440 is the determined cDNA sequence for clone 27642.

[0469] SEQ ID NO: 441 is the determined cDNA sequence for clone 27644.

[0470] SEQ ID NO: 442 is the determined cDNA sequence for clone 27646.

[0471] SEQ ID NO: 443 is the determined cDNA sequence for clone 27647.

[0472] SEQ ID NO: 444 is the determined cDNA sequence for clone 27649.

[0473] SEQ ID NO: 445 is the determined cDNA sequence for clone 27650.

[0474] SEQ ID NO: 446 is the determined cDNA sequence for clone 27651.

[0475] SEQ ID NO: 447 is the determined cDNA sequence for clone 27652.

[0476] SEQ ID NO: 448 is the determined cDNA sequence for clone 27654.

[0477] SEQ ID NO: 449 is the determined cDNA sequence for clone 27655.

[0478] SEQ ID NO: 450 is the determined cDNA sequence for clone 27657.

[0479] SEQ ID NO: 451 is the determined cDNA sequence for clone 27659.

[0480] SEQ ID NO: 452 is the determined cDNA sequence for clone 27665.

[0481] SEQ ID NO: 453 is the determined cDNA sequence for clone 27666.

[0482] SEQ ID NO: 454 is the determined cDNA sequence for clone 27668.

[0483] SEQ ID NO: 455 is the determined cDNA sequence for clone 27670.

[0484] SEQ ID NO: 456 is the determined cDNA sequence for clone 27671.

[0485] SEQ ID NO: 457 is the determined cDNA sequence for clone 27672.

[0486] SEQ ID NO: 458 is the determined cDNA sequence for clone 27674.

[0487] SEQ ID NO: 459 is the determined cDNA sequence for clone 27677.

[0488] SEQ ID NO: 460 is the determined cDNA sequence for clone 27681.

[0489] SEQ ID NO: 461 is the determined cDNA sequence for clone 27682.

[0490] SEQ ID NO: 462 is the determined cDNA sequence for clone 27683.

[0491] SEQ ID NO: 463 is the determined cDNA sequence for clone 27686.

[0492] SEQ ID NO: 464 is the determined cDNA sequence for clone 27688.

[0493] SEQ ID NO: 465 is the determined cDNA sequence for clone 27689.

[0494] SEQ ID NO: 466 is the determined cDNA sequence for clone 27690.

[0495] SEQ ID NO: 467 is the determined cDNA sequence for clone 27693.

[0496] SEQ ID NO: 468 is the determined cDNA sequence for clone 27699.

[0497] SEQ ID NO: 469 is the determined cDNA sequence for clone 27700.

[0498] SEQ ID NO: 470 is the determined cDNA sequence for clone 27702.

[0499] SEQ ID NO: 471 is the determined cDNA sequence for clone 27705.

[0500] SEQ ID NO: 472 is the determined cDNA sequence for clone 27706.

[0501] SEQ ID NO: 473 is the determined cDNA sequence for clone 27707.

[0502] SEQ ID NO: 474 is the determined cDNA sequence for clone 27708.

[0503] SEQ ID NO: 475 is the determined cDNA sequence for clone 27709.

[0504] SEQ ID NO: 476 is the determined cDNA sequence for clone 27710.

[0505] SEQ ID NO: 477 is the determined cDNA sequence for clone 27711.

[0506] SEQ ID NO: 478 is the determined cDNA sequence for clone 27712.

[0507] SEQ ID NO: 479 is the determined cDNA sequence for clone 27713.

[0508] SEQ ID NO: 480 is the determined cDNA sequence for clone 27714.

[0509] SEQ ID NO: 481 is the determined cDNA sequence for clone 27715.

[0510] SEQ ID NO: 482 is the determined cDNA sequence for clone 27716.

[0511] SEQ ID NO: 483 is the determined cDNA sequence for clone 27717.

[0512] SEQ ID NO: 484 is the determined cDNA sequence for clone 27718.

[0513] SEQ ID NO: 485 is the determined cDNA sequence for clone 27719.

[0514] SEQ ID NO: 486 is the determined cDNA sequence for clone 27720.

[0515] SEQ ID NO: 487 is the determined cDNA sequence for clone 27722.

[0516] SEQ ID NO: 488 is the determined cDNA sequence for clone 27723.

[0517] SEQ ID NO: 489 is the determined cDNA sequence for clone 27724.

[0518] SEQ ID NO: 490 is the determined cDNA sequence for clone 27726.

[0519] SEQ ID NO: 491 is the determined cDNA sequence for clone 25015.

[0520] SEQ ID NO: 492 is the determined cDNA sequence for clone 25016.

[0521] SEQ ID NO: 493 is the determined cDNA sequence for clone 25017.

[0522] SEQ ID NO: 494 is the determined cDNA sequence for clone 25018

[0523] SEQ ID NO: 495 is the determined cDNA sequence for clone 25030.

[0524] SEQ ID NO: 496 is the determined cDNA sequence for clone 25033.

[0525] SEQ ID NO: 497 is the determined cDNA sequence for clone 25034.

[0526] SEQ ID NO: 498 is the determined cDNA sequence for clone 25035.

[0527] SEQ ID NO: 499 is the determined cDNA sequence for clone 25036.

[0528] SEQ ID NO: 500 is the determined cDNA sequence for clone 25037.

[0529] SEQ ID NO: 501 is the determined cDNA sequence for clone 25038.

[0530] SEQ ID NO: 502 is the determined cDNA sequence for clone 25039.

[0531] SEQ ID NO: 503 is the determined cDNA sequence for clone 25040.

[0532] SEQ ID NO: 504 is the determined cDNA sequence for clone 25042.

[0533] SEQ ID NO: 505 is the determined cDNA sequence for clone 25043.

[0534] SEQ ID NO: 506 is the determined cDNA sequence for clone 25044.

[0535] SEQ ID NO: 507 is the determined cDNA sequence for clone 25045.

[0536] SEQ ID NO: 508 is the determined cDNA sequence for clone 25047.

[0537] SEQ ID NO: 509 is the determined cDNA sequence for clone 25048.

[0538] SEQ ID NO: 510 is the determined cDNA sequence for clone 25049.

[0539] SEQ ID NO: 511 is the determined cDNA sequence for clone 25185.

[0540] SEQ ID NO: 512 is the determined cDNA sequence for clone 25186.

[0541] SEQ ID NO: 513 is the determined cDNA sequence for clone 25187.

[0542] SEQ ID NO: 514 is the determined cDNA sequence for clone 25188.

[0543] SEQ ID NO: 515 is the determined cDNA sequence for clone 25189.

[0544] SEQ ID NO: 516 is the determined cDNA sequence for clone 25190.

[0545] SEQ ID NO: 517 is the determined cDNA sequence for clone 25193.

[0546] SEQ ID NO: 518 is the determined cDNA sequence for clone 25194.

[0547] SEQ ID NO: 519 is the determined cDNA sequence for clone 25196.

[0548] SEQ ID NO: 520 is the determined cDNA sequence for clone 25198.

[0549] SEQ ID NO: 521 is the determined cDNA sequence for clone 25199.

[0550] SEQ ID NO: 522 is the determined cDNA sequence for clone 25200.

[0551] SEQ ID NO: 523 is the determined cDNA sequence for clone 25202.

[0552] SEQ ID NO: 524 is the determined cDNA sequence for clone 25364.

[0553] SEQ ID NO: 525 is the determined cDNA sequence for clone 25366.

[0554] SEQ ID NO: 526 is the determined cDNA sequence for clone 25367.

[0555] SEQ ID NO: 527 is the determined cDNA sequence for clone 25368.

[0556] SEQ ID NO: 528 is the determined cDNA sequence for clone 25369.

[0557] SEQ ID NO: 529 is the determined cDNA sequence for clone 25370.

[0558] SEQ ID NO: 530 is the determined cDNA sequence for clone 25371.

[0559] SEQ ID NO: 531 is the determined cDNA sequence for clone 25372.

[0560] SEQ ID NO: 532 is the determined cDNA sequence for clone 25373.

[0561] SEQ ID NO: 533 is the determined cDNA sequence for clone 25374.

[0562] SEQ ID NO: 534 is the determined cDNA sequence for clone 25376.

[0563] SEQ ID NO: 535 is the determined cDNA sequence for clone 25377.

[0564] SEQ ID NO: 536 is the determined cDNA sequence for clone 25378.

[0565] SEQ ID NO: 537 is the determined cDNA sequence for clone 25379.

[0566] SEQ ID NO: 538 is the determined cDNA sequence for clone 25380.

[0567] SEQ ID NO: 539 is the determined cDNA sequence for clone 25381.

[0568] SEQ ID NO: 540 is the determined cDNA sequence for clone 25382.

[0569] SEQ ID NO: 541 is the determined cDNA sequence for clone 25383.

[0570] SEQ ID NO: 542 is the determined cDNA sequence for clone 25385.

[0571] SEQ ID NO: 543 is the determined cDNA sequence for clone 25386.

[0572] SEQ ID NO: 544 is the determined cDNA sequence for clone 25387.

[0573] SEQ ID NO: 545 is the determined cDNA sequence for clone 26013.

[0574] SEQ ID NO: 546 is the determined cDNA sequence for clone 26014.

[0575] SEQ ID NO: 547 is the determined cDNA sequence for clone 26016.

[0576] SEQ ID NO: 548 is the determined cDNA sequence for clone 26017.

[0577] SEQ ID NO: 549 is the determined cDNA sequence for clone 26018.

[0578] SEQ ID NO: 550 is the determined cDNA sequence for clone 26019.

[0579] SEQ ID NO: 551 is the determined cDNA sequence for clone 26020.

[0580] SEQ ID NO: 552 is the determined cDNA sequence for clone 26021.

[0581] SEQ ID NO: 553 is the determined cDNA sequence for clone 26022.

[0582] SEQ ID NO: 554 is the determined cDNA sequence for clone 26027.

[0583] SEQ ID NO: 555 is the determined cDNA sequence for clone 26197.

[0584] SEQ ID NO: 556 is the determined cDNA sequence for clone 26199.

[0585] SEQ ID NO: 557 is the determined cDNA sequence for clone 26201.

[0586] SEQ ID NO: 558 is the determined cDNA sequence for clone 26202.

[0587] SEQ ID NO: 559 is the determined cDNA sequence for clone 26203.

[0588] SEQ ID NO: 560 is the determined cDNA sequence for clone 26204.

[0589] SEQ ID NO: 561 is the determined cDNA sequence for clone 26205.

[0590] SEQ ID NO: 562 is the determined cDNA sequence for clone 26206.

[0591] SEQ ID NO: 563 is the determined cDNA sequence for clone 26208.

[0592] SEQ ID NO: 564 is the determined cDNA sequence for clone 26211.

[0593] SEQ ID NO: 565 is the determined cDNA sequence for clone 26212.

[0594] SEQ ID NO: 566 is the determined cDNA sequence for clone 26213.

[0595] SEQ ID NO: 567 is the determined cDNA sequence for clone 26214.

[0596] SEQ ID NO: 568 is the determined cDNA sequence for clone 26215.

[0597] SEQ ID NO: 569 is the determined cDNA sequence for clone 26216.

[0598] SEQ ID NO: 570 is the determined cDNA sequence for clone 26217.

[0599] SEQ ID NO: 571 is the determined cDNA sequence for clone 26218.

[0600] SEQ ID NO: 572 is the determined cDNA sequence for clone 26219.

[0601] SEQ ID NO: 573 is the determined cDNA sequence for clone 26220.

[0602] SEQ ID NO: 574 is the determined cDNA sequence for clone 26221.

[0603] SEQ ID NO: 575 is the determined cDNA sequence for clone 26224.

[0604] SEQ ID NO: 576 is the determined cDNA sequence for clone 26225.

[0605] SEQ ID NO: 577 is the determined cDNA sequence for clone 26226.

[0606] SEQ ID NO: 578 is the determined cDNA sequence for clone 26227.

[0607] SEQ ID NO: 579 is the determined cDNA sequence for clone 26228.

[0608] SEQ ID NO: 580 is the determined cDNA sequence for clone 26230.

[0609] SEQ ID NO: 581 is the determined cDNA sequence for clone 26231.

[0610] SEQ ID NO: 582 is the determined cDNA sequence for clone 26234.

[0611] SEQ ID NO: 583 is the determined cDNA sequence for clone 26236.

[0612] SEQ ID NO: 584 is the determined cDNA sequence for clone 26237.

[0613] SEQ ID NO: 585 is the determined cDNA sequence for clone 26239.

[0614] SEQ ID NO: 586 is the determined cDNA sequence for clone 26240.

[0615] SEQ ID NO: 587 is the determined cDNA sequence for clone 26241.

[0616] SEQ ID NO: 588 is the determined cDNA sequence for clone 26242.

[0617] SEQ ID NO: 589 is the determined cDNA sequence for clone 26246.

[0618] SEQ ID NO: 590 is the determined cDNA sequence for clone 26247.

[0619] SEQ ID NO: 591 is the determined cDNA sequence for clone 26248.

[0620] SEQ ID NO: 592 is the determined cDNA sequence for clone 26249.

[0621] SEQ ID NO: 593 is the determined cDNA sequence for clone 26250.

[0622] SEQ ID NO: 594 is the determined cDNA sequence for clone 26251.

[0623] SEQ ID NO: 595 is the determined cDNA sequence for clone 26252.

[0624] SEQ ID NO: 596 is the determined cDNA sequence for clone 26253.

[0625] SEQ ID NO: 597 is the determined cDNA sequence for clone 26254.

[0626] SEQ ID NO: 598 is the determined cDNA sequence for clone 26255.

[0627] SEQ ID NO: 599 is the determined cDNA sequence for clone 26256.

[0628] SEQ ID NO: 600 is the determined cDNA sequence for clone 26257.

[0629] SEQ ID NO: 601 is the determined cDNA sequence for clone 26259.

[0630] SEQ ID NO: 602 is the determined cDNA sequence for clone 26260.

[0631] SEQ ID NO: 603 is the determined cDNA sequence for clone 26261.

[0632] SEQ ID NO: 604 is the determined cDNA sequence for clone 26262.

[0633] SEQ ID NO: 605 is the determined cDNA sequence for clone 26263.

[0634] SEQ ID NO: 606 is the determined cDNA sequence for clone 26264.

[0635] SEQ ID NO: 607 is the determined cDNA sequence for clone 26265.

[0636] SEQ ID NO: 608 is the determined cDNA sequence for clone 26266.

[0637] SEQ ID NO: 609 is the determined cDNA sequence for clone 26268.

[0638] SEQ ID NO: 610 is the determined cDNA sequence for clone 26269.

[0639] SEQ ID NO: 611 is the determined cDNA sequence for clone 26271.

[0640] SEQ ID NO: 612 is the determined cDNA sequence for clone 26273.

[0641] SEQ ID NO: 613 is the determined cDNA sequence for clone 26810.

[0642] SEQ ID NO: 614 is the determined cDNA sequence for clone 26811.

[0643] SEQ ID NO: 615 is the determined cDNA sequence for clone 26812.1.

[0644] SEQ ID NO: 616 is the determined cDNA sequence for clone 26812.2.

[0645] SEQ ID NO: 617 is the determined cDNA sequence for clone 26813.

[0646] SEQ ID NO: 618 is the determined cDNA sequence for clone 26814.

[0647] SEQ ID NO: 619 is the determined cDNA sequence for clone 26815.

[0648] SEQ ID NO: 620 is the determined cDNA sequence for clone 26816.

[0649] SEQ ID NO: 621 is the determined cDNA sequence for clone 26818.

[0650] SEQ ID NO: 622 is the determined cDNA sequence for clone 26819.

[0651] SEQ ID NO: 623 is the determined cDNA sequence for clone 26820.

[0652] SEQ ID NO: 624 is the determined cDNA sequence for clone 26821.

[0653] SEQ ID NO: 625 is the determined cDNA sequence for clone 26822.

[0654] SEQ ID NO: 626 is the determined cDNA sequence for clone 26824.

[0655] SEQ ID NO: 627 is the determined cDNA sequence for clone 26825.

[0656] SEQ ID NO: 628 is the determined cDNA sequence for clone 26826.

[0657] SEQ ID NO: 629 is the determined cDNA sequence for clone 26827.

[0658] SEQ ID NO: 630 is the determined cDNA sequence for clone 26829.

[0659] SEQ ID NO: 631 is the determined cDNA sequence for clone 26830.

[0660] SEQ ID NO: 632 is the determined cDNA sequence for clone 26831.

[0661] SEQ ID NO: 633 is the determined cDNA sequence for clone 26832.

[0662] SEQ ID NO: 634 is the determined cDNA sequence for clone 26835.

[0663] SEQ ID NO: 635 is the determined cDNA sequence for clone 26836.

[0664] SEQ ID NO: 636 is the determined cDNA sequence for clone 26837.

[0665] SEQ ID NO: 637 is the determined cDNA sequence for clone 26839.

[0666] SEQ ID NO: 638 is the determined cDNA sequence for clone 26841.

[0667] SEQ ID NO: 639 is the determined cDNA sequence for clone 26843.

[0668] SEQ ID NO: 640 is the determined cDNA sequence for clone 26844.

[0669] SEQ ID NO: 641 is the determined cDNA sequence for clone 26845.

[0670] SEQ ID NO: 642 is the determined cDNA sequence for clone 26846.

[0671] SEQ ID NO: 643 is the determined cDNA sequence for clone 26847.

[0672] SEQ ID NO: 644 is the determined cDNA sequence for clone 26848.

[0673] SEQ ID NO: 645 is the determined cDNA sequence for clone 26849.

[0674] SEQ ID NO: 646 is the determined cDNA sequence for clone 26850.

[0675] SEQ ID NO: 647 is the determined cDNA sequence for clone 26851.

[0676] SEQ ID NO: 648 is the determined cDNA sequence for clone 26852.

[0677] SEQ ID NO: 649 is the determined cDNA sequence for clone 26853.

[0678] SEQ ID NO: 650 is the determined cDNA sequence for clone 26854.

[0679] SEQ ID NO: 651 is the determined cDNA sequence for clone 26856.

[0680] SEQ ID NO: 652 is the determined cDNA sequence for clone 26857.

[0681] SEQ ID NO: 653 is the determined cDNA sequence for clone 26858.

[0682] SEQ ID NO: 654 is the determined cDNA sequence for clone 26859.

[0683] SEQ ID NO: 655 is the determined cDNA sequence for clone 26860.

[0684] SEQ ID NO: 656 is the determined cDNA sequence for clone 26862.

[0685] SEQ ID NO: 657 is the determined cDNA sequence for clone 26863.

[0686] SEQ ID NO: 658 is the determined cDNA sequence for clone 26864.

[0687] SEQ ID NO: 659 is the determined cDNA sequence for clone 26865.

[0688] SEQ ID NO: 660 is the determined cDNA sequence for clone 26867.

[0689] SEQ ID NO: 661 is the determined cDNA sequence for clone 26868.

[0690] SEQ ID NO: 662 is the determined cDNA sequence for clone 26871.

[0691] SEQ ID NO: 663 is the determined cDNA sequence for clone 26873.

[0692] SEQ ID NO: 664 is the determined cDNA sequence for clone 26875.

[0693] SEQ ID NO: 665 is the determined cDNA sequence for clone 26876.

[0694] SEQ ID NO: 666 is the determined cDNA sequence for clone 26877.

[0695] SEQ ID NO: 667 is the determined cDNA sequence for clone 26878.

[0696] SEQ ID NO: 668 is the determined cDNA sequence for clone 26880.

[0697] SEQ ID NO: 669 is the determined cDNA sequence for clone 26882.

[0698] SEQ ID NO: 670 is the determined cDNA sequence for clone 26883.

[0699] SEQ ID NO: 671 is the determined cDNA sequence for clone 26884.

[0700] SEQ ID NO: 672 is the determined cDNA sequence for clone 26885.

[0701] SEQ ID NO: 673 is the determined cDNA sequence for clone 26886.

[0702] SEQ ID NO: 674 is the determined cDNA sequence for clone 26887.

[0703] SEQ ID NO: 675 is the determined cDNA sequence for clone 26888.

[0704] SEQ ID NO: 676 is the determined cDNA sequence for clone 26889.

[0705] SEQ ID NO: 677 is the determined cDNA sequence for clone 26890.

[0706] SEQ ID NO: 678 is the determined cDNA sequence for clone 26892.

[0707] SEQ ID NO: 679 is the determined cDNA sequence for clone 26894.

[0708] SEQ ID NO: 680 is the determined cDNA sequence for clone 26895.

[0709] SEQ ID NO: 681 is the determined cDNA sequence for clone 26897.

[0710] SEQ ID NO: 682 is the determined cDNA sequence for clone 26898.

[0711] SEQ ID NO: 683 is the determined cDNA sequence for clone 26899.

[0712] SEQ ID NO: 684 is the determined cDNA sequence for clone 26900.

[0713] SEQ ID NO: 685 is the determined cDNA sequence for clone 26901.

[0714] SEQ ID NO: 686 is the determined cDNA sequence for clone 26903.

[0715] SEQ ID NO: 687 is the determined cDNA sequence for clone 26905.

[0716] SEQ ID NO: 688 is the determined cDNA sequence for clone 26906.

[0717] SEQ ID NO: 689 is the determined cDNA sequence for clone 26708.

[0718] SEQ ID NO: 690 is the determined cDNA sequence for clone 26709.

[0719] SEQ ID NO: 691 is the determined cDNA sequence for clone 26710.

[0720] SEQ ID NO: 692 is the determined cDNA sequence for clone 26711.

[0721] SEQ ID NO: 693 is the determined cDNA sequence for clone 26712.

[0722] SEQ ID NO: 694 is the determined cDNA sequence for clone 26713.

[0723] SEQ ID NO: 695 is the determined cDNA sequence for clone 26714.

[0724] SEQ ID NO: 696 is the determined cDNA sequence for clone 26715.

[0725] SEQ ID NO: 697 is the determined cDNA sequence for clone 26716.

[0726] SEQ ID NO: 698 is the determined cDNA sequence for clone 26717.

[0727] SEQ ID NO: 699 is the determined cDNA sequence for clone 26718.

[0728] SEQ ID NO: 700 is the determined cDNA sequence for clone 26719.

[0729] SEQ ID NO: 701 is the determined cDNA sequence for clone 26720.

[0730] SEQ ID NO: 702 is the determined cDNA sequence for clone 26721.

[0731] SEQ ID NO: 703 is the determined cDNA sequence for clone 26722.

[0732] SEQ ID NO: 704 is the determined cDNA sequence for clone 26723.

[0733] SEQ ID NO: 705 is the determined cDNA sequence for clone 26724.

[0734] SEQ ID NO: 706 is the determined cDNA sequence for clone 26725.

[0735] SEQ ID NO: 707 is the determined cDNA sequence for clone 26726.

[0736] SEQ ID NO: 708 is the determined cDNA sequence for clone 26727.

[0737] SEQ ID NO: 709 is the determined cDNA sequence for clone 26728.

[0738] SEQ ID NO: 710 is the determined cDNA sequence for clone 26729.

[0739] SEQ ID NO: 711 is the determined cDNA sequence for clone 26730.

[0740] SEQ ID NO: 712 is the determined cDNA sequence for clone 26731.

[0741] SEQ ID NO: 713 is the determined cDNA sequence for clone 26732.

[0742] SEQ ID NO: 714 is the determined cDNA sequence for clone 26733.1.

[0743] SEQ ID NO: 715 is the determined cDNA sequence for clone 26733.2.

[0744] SEQ ID NO: 716 is the determined cDNA sequence for clone 26734.

[0745] SEQ ID NO: 717 is the determined cDNA sequence for clone 26735.

[0746] SEQ ID NO: 718 is the determined cDNA sequence for clone 26736.

[0747] SEQ ID NO: 719 is the determined cDNA sequence for clone 26737.

[0748] SEQ ID NO: 720 is the determined cDNA sequence for clone 26738.

[0749] SEQ ID NO: 721 is the determined cDNA sequence for clone 26739.

[0750] SEQ ID NO: 722 is the determined cDNA sequence for clone 26741.

[0751] SEQ ID NO: 723 is the determined cDNA sequence for clone 26742.

[0752] SEQ ID NO: 724 is the determined cDNA sequence for clone 26743.

[0753] SEQ ID NO: 725 is the determined cDNA sequence for clone 26744.

[0754] SEQ ID NO: 726 is the determined cDNA sequence for clone 26745.

[0755] SEQ ID NO: 727 is the determined cDNA sequence for clone 26746.

[0756] SEQ ID NO: 728 is the determined cDNA sequence for clone 26747.

[0757] SEQ ID NO: 729 is the determined cDNA sequence for clone 26748.

[0758] SEQ ID NO: 730 is the determined cDNA sequence for clone 26749.

[0759] SEQ ID NO: 731 is the determined cDNA sequence for clone 26750.

[0760] SEQ ID NO: 732 is the determined cDNA sequence for clone 26751.

[0761] SEQ ID NO: 733 is the determined cDNA sequence for clone 26752.

[0762] SEQ ID NO: 734 is the determined cDNA sequence for clone 26753.

[0763] SEQ ID NO: 735 is the determined cDNA sequence for clone 26754.

[0764] SEQ ID NO: 736 is the determined cDNA sequence for clone 26755.

[0765] SEQ ID NO: 737 is the determined cDNA sequence for clone 26756.

[0766] SEQ ID NO: 738 is the determined cDNA sequence for clone 26757.

[0767] SEQ ID NO: 739 is the determined cDNA sequence for clone 26758.

[0768] SEQ ID NO: 740 is the determined cDNA sequence for clone 26759.

[0769] SEQ ID NO: 741 is the determined cDNA sequence for clone 26760.

[0770] SEQ ID NO: 742 is the determined cDNA sequence for clone 26761.

[0771] SEQ ID NO: 743 is the determined cDNA sequence for clone 26762.

[0772] SEQ ID NO: 744 is the determined cDNA sequence for clone 26763.

[0773] SEQ ID NO: 745 is the determined cDNA sequence for clone 26764.

[0774] SEQ ID NO: 746 is the determined cDNA sequence for clone 26765.

[0775] SEQ ID NO: 747 is the determined cDNA sequence for clone 26766.

[0776] SEQ ID NO: 748 is the determined cDNA sequence for clone 26767.

[0777] SEQ ID NO: 749 is the determined cDNA sequence for clone 26768.

[0778] SEQ ID NO: 750 is the determined cDNA sequence for clone 26769.

[0779] SEQ ID NO: 751 is the determined cDNA sequence for clone 26770.

[0780] SEQ ID NO: 752 is the determined cDNA sequence for clone 26771.

[0781] SEQ ID NO: 753 is the determined cDNA sequence for clone 26772.

[0782] SEQ ID NO: 754 is the determined cDNA sequence for clone 26773.

[0783] SEQ ID NO: 755 is the determined cDNA sequence for clone 26774.

[0784] SEQ ID NO: 756 is the determined cDNA sequence for clone 26775.

[0785] SEQ ID NO: 757 is the determined cDNA sequence for clone 26776.

[0786] SEQ ID NO: 758 is the determined cDNA sequence for clone 26777.

[0787] SEQ ID NO: 759 is the determined cDNA sequence for clone 26778.

[0788] SEQ ID NO: 760 is the determined cDNA sequence for clone 26779.

[0789] SEQ ID NO: 761 is the determined cDNA sequence for clone 26781.

[0790] SEQ ID NO: 762 is the determined cDNA sequence for clone 26782.

[0791] SEQ ID NO: 763 is the determined cDNA sequence for clone 26783.

[0792] SEQ ID NO: 764 is the determined cDNA sequence for clone 26784.

[0793] SEQ ID NO: 765 is the determined cDNA sequence for clone 26785.

[0794] SEQ ID NO: 766 is the determined cDNA sequence for clone 26786.

[0795] SEQ ID NO: 767 is the determined cDNA sequence for clone 26787.

[0796] SEQ ID NO: 768 is the determined cDNA sequence for clone 26788.

[0797] SEQ ID NO: 769 is the determined cDNA sequence for clone 26790.

[0798] SEQ ID NO: 770 is the determined cDNA sequence for clone 26791.

[0799] SEQ ID NO: 771 is the determined cDNA sequence for clone 26792.

[0800] SEQ ID NO: 772 is the determined cDNA sequence for clone 26793.

[0801] SEQ ID NO: 773 is the determined cDNA sequence for clone 26794.

[0802] SEQ ID NO: 774 is the determined cDNA sequence for clone 26795.

[0803] SEQ ID NO: 775 is the determined cDNA sequence for clone 26796.

[0804] SEQ ID NO: 776 is the determined cDNA sequence for clone 26797.

[0805] SEQ ID NO: 777 is the determined cDNA sequence for clone 26798.

[0806] SEQ ID NO: 778 is the determined cDNA sequence for clone 26800.

[0807] SEQ ID NO: 779 is the determined cDNA sequence for clone 26801.

[0808] SEQ ID NO: 780 is the determined cDNA sequence for clone 26802.

[0809] SEQ ID NO: 781 is the determined cDNA sequence for clone 26803.

[0810] SEQ ID NO: 782 is the determined cDNA sequence for clone 26804.

[0811] SEQ ID NO: 783 is the amino acid sequence for L773P.

[0812] SEQ ID NO: 784 is the determined DNA sequence of the L773P expression construct.

[0813] SEQ ID NO: 785 is the determined DNA sequence of the L773PA expression construct.

### DETAILED DESCRIPTION OF THE INVENTION

[0814] As noted above, the present invention is generally directed to compositions and methods for the therapy and diagnosis of cancer, such as lung cancer. The compositions described herein may include lung tumor polypeptides, polynucleotides encoding such polypeptides, binding agents such as antibodies, antigen presenting cells (APCs) and/or immune system cells (e.g., T cells). Polypeptides of the present invention generally comprise at least a portion (such as an immunogenic portion) of a lung tumor protein or a variant thereof As used herein, a “lung tumor protein” is a protein that is expressed in lung tumor cells at a level that is at least two fold, and preferably at least five fold, greater than the level of expression in a normal tissue, as determined using a representative assay provided herein. Certain lung tumor proteins are tumor proteins that react detectably (within an immunoassay, such as an ELISA or Western blot) with antisera of a patient afflicted with lung cancer. Polynucleotides of the subject invention generally comprise a DNA or RNA sequence that encodes all or a portion of such a polypeptide, or that is complementary to such a sequence. Antibodies are generally immune system proteins, or antigen-binding fragments thereof, that are capable of binding to a polypeptide as described above. Antigen presenting cells include dendritic cells and macrophages that express a polypeptide as described above. T cells that may be employed within such compositions are generally T cells that are specific for a polypeptide as described above.

[0815] The present invention is based on the discovery of human lung tumor proteins. Partial and/or full-length sequences of polynucleotides encoding specific tumor proteins are provided in SEQ ID NO: 1-782, 784 and 785.

[0816] Lung Tumor Protein Polynucleotides

[0817] Any polynucleotide that encodes a lung tumor protein or a portion or other variant thereof as described herein is encompassed by the present invention. Preferred polynucleotides comprise at least 15 consecutive nucleotides, preferably at least 30 consecutive nucleotides and more preferably at least 45 consecutive nucleotides, of a sequence that encodes a portion of a lung tumor protein. More preferably, a polynucleotide encodes an immunogenic portion of a lung tumor protein. Polynucleotides complementary to any such sequences are also encompassed by the present invention. Polynucleotides may be single-stranded (coding or antisense) or double-stranded, and may be DNA (genomic, cDNA or synthetic) or RNA molecules. RNA molecules include HnRNA molecules, which contain introns and correspond to a DNA molecule in a one-to-one manner, and mRNA molecules, which do not contain introns. Additional coding or non-coding sequences may, but need not, be present within a polynucleotide of the present invention, and a polynucleotide may, but need not, be linked to other molecules and/or support materials.

[0818] Polynucleotides may comprise a native sequence (i.e., an endogenous sequence that encodes a lung tumor protein or a portion thereof) or may comprise a variant of such a sequence. Polynucleotide variants may contain one or more substitutions, additions, deletions and/or insertions such that the immunogenicity of the encoded polypeptide is not diminished, relative to a native tumor protein. The effect on the immunogenicity of the encoded polypeptide may generally be assessed as described herein. Variants preferably exhibit at least about 70% identity, more preferably at least about 80% identity and most preferably at least about 90% identity to a polynucleotide sequence that encodes a native lung tumor protein or a portion thereof Two polynucleotide or polypeptide sequences are said to be “identical” if the sequence of nucleotides or amino acids in the two sequences is the same when aligned for maximum correspondence as described below. Comparisons between two sequences are typically performed by comparing the sequences over a comparison window to identify and compare local regions of sequence similarity. A “comparison window” as used herein, refers to a segment of at least about 20 contiguous positions, usually 30 to about 75, 40 to about 50, in which a sequence may be compared to a reference sequence of the same number of contiguous positions after the two sequences are optimally aligned.

[0819] Optimal alignment of sequences for comparison may be conducted using the Megalign program in the Lasergene suite of bioinformatics software (DNASTAR, Inc., Madison, Wis.), using default parameters. This program embodies several alignment schemes described in the following references: Dayhoff, M. O. (1978) A model of evolutionary change in proteins—Matrices for detecting distant relationships. In Dayhoff, M. O. (ed.) Atlas of Protein Sequence and Structure, National Biomedical Research Foundation, Washington D.C. Vol. 5, Suppl. 3, pp. 345-358; Hein J. (1990) Unified Approach to Alignment and Phylogenes pp. 626-645 Methods in Enzymology vol. 183, Academic Press, Inc., San Diego, Calif.; Higgins, D. G. and Sharp, P. M. (1989) CABIOS 5:151-153; Myers, E. W. and Muller W. (1988) CABIOS 4:11-17; Robinson, E. D. (1971) Comb. Theor 11:105; Santou, N. Nes, M. (1987) Mol. Biol. Evol. 4:406-425; Sneath, P. H. A. and Sokal, R. R. (1973) Numerical Taxonomy—the Principles and Practice of Numerical Taxonomy, Freeman Press, San Francisco, Calif.; Wilbur, W. J. and Lipman, D. J. (1983) Proc. Natl. Acad., Sci. USA 80:726-730.

[0820] Preferably, the “percentage of sequence identity” is determined by comparing two optimally aligned sequences over a window of comparison of at least 20 positions, wherein the portion of the polynucleotide or polypeptide sequence in the comparison window may comprise additions or deletions (i.e. gaps) of 20 percent or less, usually 5 to 15 percent, or 10 to 12 percent, as compared to the reference sequences (which does not comprise additions or deletions) for optimal alignment of the two sequences. The percentage is calculated by determining the number of positions at which the identical nucleic acid bases or amino acid residue occurs in both sequences to yield the number of matched positions, dividing the number of matched positions by the total number of positions in the reference sequence (i.e. the window size) and multiplying the results by 100 to yield the percentage of sequence identity.

[0821] Variants may also, or alternatively, be substantially homologous to a native gene, or a portion or complement thereof Such polynucleotide variants are capable of hybridizing under moderately stringent conditions to a naturally occurring DNA sequence encoding a native lung tumor protein (or a complementary sequence). Suitable moderately stringent conditions include prewashing in a solution of 5×SSC, 0.5% SDS, 1.0 mM EDTA pH 8.0); hybridizing at 50° C.-65° C., 5×SSC, overnight; followed by washing twice at 65° C. for 20 minutes with each of 2×, 0.5× and 0.2×SSC containing 0.1% SDS.

[0822] It will be appreciated by those of ordinary skill in the art that, as a result of the degeneracy of the genetic code, there are many nucleotide sequences that encode a polypeptide as described herein. Some of these polynucleotides bear minimal homology to the nucleotide sequence of any native gene. Nonetheless, polynucleotides that vary due to differences in codon usage are specifically contemplated by the present invention. Further, alleles of the genes comprising the polynucleotide sequences provided herein are within the scope of the present invention. Alleles are endogenous genes that are altered as a result of one or more mutations, such as deletions, additions and/or substitutions of nucleotides. The resulting mRNA and protein may, but need not, have an altered structure or function. Alleles may be identified using standard techniques (such as hybridization, amplification and/or database sequence comparison).

[0823] Polynucleotides may be prepared using any of a variety of techniques. For example, a polynucleotide may be identified, as described in more detail below, by screening a microarray of cDNAs for tumor-associated expression (i.e., expression that is at least five fold greater in a lung tumor than in normal tissue, as determined using a representative assay provided herein). Such screens may be performed using an Incyte microarray (Palo Alto, Calif.) according to the manufacturer's instructions (and essentially as described by Schena et al., Proc. Natl. Acad. Sci. USA 93:10614-10619, 1996 and Heller et al., Proc. Natl. Acad. Sci. USA 94:2150-2155, 1997). Alternatively, polypeptides may be amplified from cDNA prepared from cells expressing the proteins described herein, such as lung tumor cells. Such polynucleotides may be amplified via polymerase chain reaction (PCR). For this approach, sequence-specific primers may be designed based on the sequences provided herein, and may be purchased or synthesized.

[0824] An amplified portion may be used to isolate a full length gene from a suitable library (e.g., a lung tumor cDNA library) using well known techniques. Within such techniques, a library (cDNA or genomic) is screened using one or more polynucleotide probes or primers suitable for amplification. Preferably, a library is size-selected to include larger molecules. Random primed libraries may also be preferred for identifying 5′ and upstream regions of genes. Genomic libraries are preferred for obtaining introns and extending 5′ sequences.

[0825] For hybridization techniques, a partial sequence may be labeled (e.g. by nick-translation or end-labeling with ³²P) using well known techniques. A bacterial or bacteriophage library is then screened by hybridizing filters containing denatured bacterial colonies (or lawns containing phage plaques) with the labeled probe (see Sambrook et al., Molecular Cloning: A Laboratory Manual, Cold Spring Harbor Laboratories, Cold Spring Harbor, N.Y., 1989). Hybridizing colonies or plaques are selected and expanded, and the DNA is isolated for further analysis. cDNA clones may be analyzed to determine the amount of additional sequence by, for example, PCR using a primer from the partial sequence and a primer from the vector. Restriction maps and partial sequences may be generated to identify one or more overlapping clones. The complete sequence may then be determined using standard techniques, which may involve generating a series of deletion clones. The resulting overlapping sequences are then assembled into a single contiguous sequence. A full length cDNA molecule can be generated by ligating suitable fragments, using well known techniques.

[0826] Alternatively, there are numerous amplification techniques for obtaining a full length coding sequence from a partial cDNA sequence. Within such techniques, amplification is generally performed via PCR. Any of a variety of commercially available kits may be used to perform the amplification step. Primers may be designed using, for example, software well known in the art. Primers are preferably 22-30 nucleotides in length, have a GC content of at least 50% and anneal to the target sequence at temperatures of about 68° C. to 72° C. The amplified region may be sequenced as described above, and overlapping sequences assembled into a contiguous sequence.

[0827] One such amplification technique is inverse PCR (see Triglia et al., Nucl. Acids Res. 16:8186, 1988), which uses restriction enzymes to generate a fragment in the known region of the gene. The fragment is then circularized by intramolecular ligation and used as a template for PCR with divergent primers derived from the known region. Within an alternative approach, sequences adjacent to a partial sequence may be retrieved by amplification with a primer to a linker sequence and a primer specific to a known region. The amplified sequences are typically subjected to a second round of amplification with the same linker primer and a second primer specific to the known region. A variation on this procedure, which employs two primers that initiate extension in opposite directions from the known sequence, is described in WO 96/38591. Another such technique is known as “rapid amplification of cDNA ends” or RACE. This technique involves the use of an internal primer and an external primer, which hybridizes to a polyA region or vector sequence, to identify sequences that are 5′ and 3′ of a known sequence. Additional techniques include capture PCR (Lagerstrom et al., PCR Methods Applic. 1:111-19, 1991) and walking PCR (Parker et al., Nucl. Acids. Res. 19:3055-60, 1991). Other methods employing amplification may also be employed to obtain a full length cDNA sequence.

[0828] In certain instances, it is possible to obtain a full length cDNA sequence by analysis of sequences provided in an expressed sequence tag (EST) database, such as that available from GenBank. Searches for overlapping ESTs may generally be performed using well known programs (e.g., NCBI BLAST searches), and such ESTs may be used to generate a contiguous full length sequence.

[0829] Certain nucleic acid sequences of cDNA molecules encoding portions of lung tumor proteins are provided in SEQ ID NO: 1-782, 784 and 785. These polynucleotides were isolated from lung tumor cDNA libraries using conventional and/or PCR-based subtraction techniques, as described below.

[0830] Polynucleotide variants may generally be prepared by any method known in the art, including chemical synthesis by, for example, solid phase phosphoramidite chemical synthesis. Modifications in a polynucleotide sequence may also be introduced using standard mutagenesis techniques, such as oligonucleotide-directed site-specific mutagenesis (see Adelman et al., DNA 2:183, 1983). Alternatively, RNA molecules may be generated by in vitro or in vivo transcription of DNA sequences encoding a lung tumor protein, or portion thereof, provided that the DNA is incorporated into a vector with a suitable RNA polymerase promoter (such as T7 or SP6). Certain portions may be used to prepare an encoded polypeptide, as described herein. In addition, or alternatively, a portion may be administered to a patient such that the encoded polypeptide is generated in vivo (e.g., by transfecting antigen-presenting cells, such as dendritic cells, with a cDNA construct encoding a lung tumor polypeptide, and administering the transfected cells to the patient).

[0831] A portion of a sequence complementary to a coding sequence (i.e., an antisense polynucleotide) may also be used as a probe or to modulate gene expression. cDNA constructs that can be transcribed into antisense RNA may also be introduced into cells of tissues to facilitate the production of antisense RNA. An antisense polynucleotide may be used, as described herein, to inhibit expression of a tumor protein. Antisense technology can be used to control gene expression through triple-helix formation, which compromises the ability of the double helix to open sufficiently for the binding of polymerases, transcription factors or regulatory molecules (see Gee et al., In Huber and Carr, Molecular and Immunologic Approaches, Futura Publishing Co. (Mt. Kisco, N.Y.; 1994)). Alternatively, an antisense molecule may be designed to hybridize with a control region of a gene (e.g., promoter, enhancer or transcription initiation site), and block transcription of the gene; or to block translation by inhibiting binding of a transcript to ribosomes.

[0832] A portion of a coding sequence, or of a complementary sequence, may also be designed as a probe or primer to detect gene expression. Probes may be labeled with a variety of reporter groups, such as radionuclides and enzymes, and are preferably at least 10 nucleotides in length, more preferably at least 20 nucleotides in length and still more preferably at least 30 nucleotides in length. Primers, as noted above, are preferably 22-30 nucleotides in length.

[0833] Any polynucleotide may be further modified to increase stability in vivo. Possible modifications include, but are not limited to, the addition of flanking sequences at the 5′ and/or 3′ ends; the use of phosphorothioate or 2′ O-methyl rather than phosphodiesterase linkages in the backbone; and/or the inclusion of nontraditional bases such as inosine, queosine and wybutosine, as well as acetyl- methyl-, thio- and other modified forms of adenine, cytidine, guanine, thymine and uridine.

[0834] Nucleotide sequences as described herein may be joined to a variety of other nucleotide sequences using established recombinant DNA techniques. For example, a polynucleotide may be cloned into any of a variety of cloning vectors, including plasmids, phagemids, lambda phage derivatives and cosmids. Vectors of particular interest include expression vectors, replication vectors, probe generation vectors and sequencing vectors. In general, a vector will contain an origin of replication functional in at least one organism, convenient restriction endonuclease sites and one or more selectable markers. Other elements will depend upon the desired use, and will be apparent to those of ordinary skill in the art.

[0835] Within certain embodiments, polynucleotides may be formulated so as to permit entry into a cell of a mammal, and expression therein. Such formulations are particularly useful for therapeutic purposes, as described below. Those of ordinary skill in the art will appreciate that there are many ways to achieve expression of a polynucleotide in a target cell, and any suitable method may be employed. For example, a polynucleotide may be incorporated into a viral vector such as, but not limited to, adenovirus, adeno-associated virus, retrovirus, or vaccinia or other pox virus (e.g., avian pox virus). Techniques for incorporating DNA into such vectors are well known to those of ordinary skill in the art. A retroviral vector may additionally transfer or incorporate a gene for a selectable marker (to aid in the identification or selection of transduced cells) and/or a targeting moiety, such as a gene that encodes a ligand for a receptor on a specific target cell, to render the vector target specific. Targeting may also be accomplished using an antibody, by methods known to those of ordinary skill in the art.

[0836] Other formulations for therapeutic purposes include colloidal dispersion systems, such as macromolecule complexes, nanocapsules, microspheres, beads, and lipid-based systems including oil-in-water emulsions, micelles, mixed micelles, and liposomes. A preferred colloidal system for use as a delivery vehicle in vitro and in vivo is a liposome (i.e., an artificial membrane vesicle). The preparation and use of such systems is well known in the art.

[0837] Lung Tumor Polypeptides

[0838] Within the context of the present invention, polypeptides may comprise at least an immunogenic portion of a lung tumor protein or a variant thereof, as described herein. As noted above, a “lung tumor protein” is a protein that is expressed by lung tumor cells. Lung tumor proteins also react detectably within an immunoassay (such as an ELISA) with antisera from a patient with lung cancer. Polypeptides as described herein may be of any length. Additional sequences derived from the native protein and/or heterologous sequences may be present, and such sequences may (but need not) possess further immunogenic or antigenic properties.

[0839] An “immunogenic portion,” as used herein is a portion of a protein that is recognized (i.e., specifically bound) by a B-cell and/or T-cell surface antigen receptor. Such immunogenic portions generally comprise at least 5 amino acid residues, more preferably at least 10, and still more preferably at least 20 amino acid residues, of a lung tumor protein or a variant thereof Certain preferred immunogenic portions include peptides in which an N-terminal leader sequence and/or transmembrane domain have been deleted. Other preferred immunogenic portions may contain a small N- and/or C-terminal deletion (e.g., 1-30 amino acids, preferably 5-15 amino acids), relative to the mature protein.

[0840] Immunogenic portions may generally be identified using well known techniques, such as those summarized in Paul, Fundamental Immunology, 3rd ed., 243-247 (Raven Press, 1993) and references cited therein. Such techniques include screening polypeptides for the ability to react with antigen-specific antibodies, antisera and/or T-cell lines or clones. As used herein, antisera and antibodies are “antigen-specific” if they specifically bind to an antigen (i.e., they react with the protein in an ELISA or other immunoassay, and do not react detectably with unrelated proteins). Such antisera and antibodies may be prepared as described herein, and using well known techniques. An immunogenic portion of a native lung tumor protein is a portion that reacts with such antisera and/or T-cells at a level that is not substantially less than the reactivity of the full length polypeptide (e.g., in an ELISA and/or T-cell reactivity assay). Such immunogenic portions may react within such assays at a level that is similar to or greater than the reactivity of the full length polypeptide. Such screens may generally be performed using methods well known to those of ordinary skill in the art, such as those described in Harlow and Lane, Antibodies: A Laboratory Manual, Cold Spring Harbor Laboratory, 1988. For example, a polypeptide may be immobilized on a solid support and contacted with patient sera to allow binding of antibodies within the sera to the immobilized polypeptide. Unbound sera may then be removed and bound antibodies detected using, for example, ¹²⁵I-labeled Protein A.

[0841] As noted above, a composition may comprise a variant of a native lung tumor protein. A polypeptide “variant,” as used herein, is a polypeptide that differs from a native lung tumor protein in one or more substitutions, deletions, additions and/or insertions, such that the immunogenicity of the polypeptide is not substantially diminished. In other words, the ability of a variant to react with antigen-specific antisera may be enhanced or unchanged, relative to the native protein, or may be diminished by less than 50%, and preferably less than 20%, relative to the native protein. Such variants may generally be identified by modifying one of the above polypeptide sequences and evaluating the reactivity of the modified polypeptide with antigen-specific antibodies or antisera as described herein. Preferred variants include those in which one or more portions, such as an N-terminal leader sequence or transmembrane domain, have been removed. Other preferred variants include variants in which a small portion (e.g., 1-30 amino acids, preferably 5-15 amino acids) has been removed from the N- and/or C-terminal of the mature protein.

[0842] Polypeptide variants preferably exhibit at least about 70%, more preferably at least about 90% and most preferably at least about 95% identity (determined as described above) to the identified polypeptides.

[0843] Preferably, a variant contains conservative substitutions. A “conservative substitution” is one in which an amino acid is substituted for another amino acid that has similar properties, such that one skilled in the art of peptide chemistry would expect the secondary structure and hydropathic nature of the polypeptide to be substantially unchanged. Amino acid substitutions may generally be made on the basis of similarity in polarity, charge, solubility, hydrophobicity, hydrophilicity and/or the amphipathic nature of the residues. For example, negatively charged amino acids include aspartic acid and glutamic acid; positively charged amino acids include lysine and arginine; and amino acids with uncharged polar head groups having similar hydrophilicity values include leucine, isoleucine and valine; glycine and alanine; asparagine and glutamine; and serine, threonine, phenylalanine and tyrosine. Other groups of amino acids that may represent conservative changes include: (1) ala, pro, gly, glu, asp, gln, asn, ser, thr; (2) cys, ser, tyr, thr; (3) val, ile, leu, met, ala, phe; (4) lys, arg, his; and (5) phe, tyr, trp, his. A variant may also, or alternatively, contain nonconservative changes. In a preferred embodiment, variant polypeptides differ from a native sequence by substitution, deletion or addition of five amino acids or fewer. Variants may also (or alternatively) be modified by, for example, the deletion or addition of amino acids that have minimal influence on the immunogenicity, secondary structure and hydropathic nature of the polypeptide.

[0844] As noted above, polypeptides may comprise a signal (or leader) sequence at the N-terminal end of the protein which co-translationally or post-translationally directs transfer of the protein. The polypeptide may also be conjugated to a linker or other sequence for ease of synthesis, purification or identification of the polypeptide (e.g., poly-His), or to enhance binding of the polypeptide to a solid support. For example, a polypeptide may be conjugated to an immunoglobulin Fc region.

[0845] Polypeptides may be prepared using any of a variety of well known techniques. Recombinant polypeptides encoded by DNA sequences as described above may be readily prepared from the DNA sequences using any of a variety of expression vectors known to those of ordinary skill in the art. Expression may be achieved in any appropriate host cell that has been transformed or transfected with an expression vector containing a DNA molecule that encodes a recombinant polypeptide. Suitable host cells include prokaryotes, yeast and higher eukaryotic cells. Preferably, the host cells employed are E. coli, yeast or a mammalian cell line such as COS or CHO. Supernatants from suitable host/vector systems which secrete recombinant protein or polypeptide into culture media may be first concentrated using a commercially available filter. Following concentration, the concentrate may be applied to a suitable purification matrix such as an affinity matrix or an ion exchange resin. Finally, one or more reverse phase HPLC steps can be employed to further purify a recombinant polypeptide.

[0846] Portions and other variants having fewer than about 100 amino acids, and generally fewer than about 50 amino acids, may also be generated by synthetic means, using techniques well known to those of ordinary skill in the art. For example, such polypeptides may be synthesized using any of the commercially available solid-phase techniques, such as the Merrifield solid-phase synthesis method, where amino acids are sequentially added to a growing amino acid chain. See Merrifield, J. Am. Chem. Soc. 85:2149-2146, 1963. Equipment for automated synthesis of polypeptides is commercially available from suppliers such as Perkin Elmer/Applied BioSystems Division (Foster City, Calif.), and may be operated according to the manufacturer's instructions.

[0847] Within certain specific embodiments, a polypeptide may be a fusion protein that comprises multiple polypeptides as described herein, or that comprises at least one polypeptide as described herein and an unrelated sequence, such as a known tumor protein. A fusion partner may, for example, assist in providing T helper epitopes (an immunological fusion partner), preferably T helper epitopes recognized by humans, or may assist in expressing the protein (an expression enhancer) at higher yields than the native recombinant protein. Certain preferred fusion partners are both immunological and expression enhancing fusion partners. Other fusion partners may be selected so as to increase the solubility of the protein or to enable the protein to be targeted to desired intracellular compartments. Still further fusion partners include affinity tags, which facilitate purification of the protein.

[0848] Fusion proteins may generally be prepared using standard techniques, including chemical conjugation. Preferably, a fusion protein is expressed as a recombinant protein, allowing the production of increased levels, relative to a non-fused protein, in an expression system. Briefly, DNA sequences encoding the polypeptide components may be assembled separately, and ligated into an appropriate expression vector. The 3′ end of the DNA sequence encoding one polypeptide component is ligated, with or without a peptide linker, to the 5′ end of a DNA sequence encoding the second polypeptide component so that the reading frames of the sequences are in phase. This permits translation into a single fusion protein that retains the biological activity of both component polypeptides.

[0849] A peptide linker sequence may be employed to separate the first and the second polypeptide components by a distance sufficient to ensure that each polypeptide folds into its secondary and tertiary structures. Such a peptide linker sequence is incorporated into the fusion protein using standard techniques well known in the art. Suitable peptide linker sequences may be chosen based on the following factors: (1) their ability to adopt a flexible extended conformation; (2) their inability to adopt a secondary structure that could interact with functional epitopes on the first and second polypeptides; and (3) the lack of hydrophobic or charged residues that might react with the polypeptide functional epitopes. Preferred peptide linker sequences contain Gly, Asn and Ser residues. Other near neutral amino acids, such as Thr and Ala may also be used in the linker sequence. Amino acid sequences which may be usefully employed as linkers include those disclosed in Maratea et al., Gene 40:39-46, 1985; Murphy et al., Proc. Natl. Acad. Sci. USA 83:8258-8262, 1986; U.S. Pat. No. 4,935,233 and U.S. Pat. No. 4,751,180. The linker sequence may generally be from 1 to about 50 amino acids in length. Linker sequences are not required when the first and second polypeptides have non-essential N-terminal amino acid regions that can be used to separate the functional domains and prevent steric interference.

[0850] The ligated DNA sequences are operably linked to suitable transcriptional or translational regulatory elements. The regulatory elements responsible for expression of DNA are located only 5′ to the DNA sequence encoding the first polypeptides. Similarly, stop codons required to end translation and transcription termination signals are only present 3′ to the DNA sequence encoding the second polypeptide.

[0851] Fusion proteins are also provided that comprise a polypeptide of the present invention together with an unrelated immunogenic protein. Preferably the immunogenic protein is capable of eliciting a recall response. Examples of such proteins include tetanus, tuberculosis and hepatitis proteins (see, for example, Stoute et al. New Engl. J. Med., 336:86-91, 1997).

[0852] Within preferred embodiments, an immunological fusion partner is derived from protein D, a surface protein of the gram-negative bacterium Haemophilus influenza B (WO 91/18926). Preferably, a protein D derivative comprises approximately the first third of the protein (e.g., the first N-terminal 100-110 amino acids), and a protein D derivative may be lipidated. Within certain preferred embodiments, the first 109 residues of a Lipoprotein D fusion partner is included on the N-terminus to provide the polypeptide with additional exogenous T-cell epitopes and to increase the expression level in E. coli (thus functioning as an expression enhancer). The lipid tail ensures optimal presentation of the antigen to antigen present cells. Other fusion partners include the non-structural protein from influenzae virus, NS1 (hemaglutinin). Typically, the N-terminal 81 amino acids are used, although different fragments that include T-helper epitopes may be used.

[0853] In another embodiment, the immunological fusion partner is the protein known as LYTA, or a portion thereof (preferably a C-terminal portion). LYTA is derived from Streptococcus pneumoniae, which synthesizes an N-acetyl-L-alanine amidase known as amidase LYTA (encoded by the LytA gene; Gene 43:265-292, 1986). LYTA is an autolysin that specifically degrades certain bonds in the peptidoglycan backbone. The C-terminal domain of the LYTA protein is responsible for the affinity to the choline or to some choline analogues such as DEAE. This property has been exploited for the development of E. coli C-LYTA expressing plasmids useful for expression of fusion proteins. Purification of hybrid proteins containing the C-LYTA fragment at the amino terminus has been described (see Biotechnology 10:795-798, 1992). Within a preferred embodiment, a repeat portion of LYTA may be incorporated into a fusion protein. A repeat portion is found in the C-terminal region starting at residue 178. A particularly preferred repeat portion incorporates residues 188-305.

[0854] In general, polypeptides (including fusion proteins) and polynucleotides as described herein are isolated. An “isolated” polypeptide or polynucleotide is one that is removed from its original environment. For example, a naturally-occurring protein is isolated if it is separated from some or all of the coexisting materials in the natural system. Preferably, such polypeptides are at least about 90% pure, more preferably at least about 95% pure and most preferably at least about 99% pure. A polynucleotide is considered to be isolated if, for example, it is cloned into a vector that is not a part of the natural environment.

[0855] Binding Agents

[0856] The present invention further provides agents, such as antibodies and antigen-binding fragments thereof, that specifically bind to a lung tumor protein. As used herein, an antibody, or antigen-binding fragment thereof, is said to “specifically bind” to a lung tumor protein if it reacts at a detectable level (within, for example, an ELISA) with a lung tumor protein, and does not react detectably with unrelated proteins under similar conditions. As used herein, “binding” refers to a noncovalent association between two separate molecules such that a complex is formed. The ability to bind may be evaluated by, for example, determining a binding constant for the formation of the complex. The binding constant is the value obtained when the concentration of the complex is divided by the product of the component concentrations. In general, two compounds are said to “bind,” in the context of the present invention, when the binding constant for complex formation exceeds about 10³ L/mol. The binding constant may be determined using methods well known in the art.

[0857] Binding agents may be further capable of differentiating between patients with and without a cancer, such as lung cancer, using the representative assays provided herein. In other words, antibodies or other binding agents that bind to a lung tumor protein will generate a signal indicating the presence of a cancer in at least about 20% of patients with the disease, and will generate a negative signal indicating the absence of the disease in at least about 90% of individuals without the cancer. To determine whether a binding agent satisfies this requirement, biological samples (e.g., blood, sera, urine, sputum and/or tumor biopsies) from patients with and without a cancer (as determined using standard clinical tests) may be assayed as described herein for the presence of polypeptides that bind to the binding agent. It will be apparent that a statistically significant number of samples with and without the disease should be assayed. Each binding agent should satisfy the above criteria; however, those of ordinary skill in the art will recognize that binding agents may be used in combination to improve sensitivity.

[0858] Any agent that satisfies the above requirements may be a binding agent. For example, a binding agent may be a ribosome, with or without a peptide component, an RNA molecule or a polypeptide. In a preferred embodiment, a binding agent is an antibody or an antigen-binding fragment thereof Antibodies may be prepared by any of a variety of techniques known to those of ordinary skill in the art. See, e.g., Harlow and Lane, Antibodies: A Laboratory Manual, Cold Spring Harbor Laboratory, 1988. In general, antibodies can be produced by cell culture techniques, including the generation of monoclonal antibodies as described herein, or via transfection of antibody genes into suitable bacterial or mammalian cell hosts, in order to allow for the production of recombinant antibodies. In one technique, an immunogen comprising the polypeptide is initially injected into any of a wide variety of mammals (e.g., mice, rats, rabbits, sheep or goats). In this step, the polypeptides of this invention may serve as the immunogen without modification. Alternatively, particularly for relatively short polypeptides, a superior immune response may be elicited if the polypeptide is joined to a carrier protein, such as bovine serum albumin or keyhole limpet hemocyanin. The immunogen is injected into the animal host, preferably according to a predetermined schedule incorporating one or more booster immunizations, and the animals are bled periodically. Polyclonal antibodies specific for the polypeptide may then be purified from such antisera by, for example, affinity chromatography using the polypeptide coupled to a suitable solid support.

[0859] Monoclonal antibodies specific for an antigenic polypeptide of interest may be prepared, for example, using the technique of Kohler and Milstein, Eur. J. Immunol. 6:511-519, 1976, and improvements thereto. Briefly, these methods involve the preparation of immortal cell lines capable of producing antibodies having the desired specificity (i.e., reactivity with the polypeptide of interest). Such cell lines may be produced, for example, from spleen cells obtained from an animal immunized as described above. The spleen cells are then immortalized by, for example, fusion with a myeloma cell fusion partner, preferably one that is syngeneic with the immunized animal. A variety of fusion techniques may be employed. For example, the spleen cells and myeloma cells may be combined with a nonionic detergent for a few minutes and then plated at low density on a selective medium that supports the growth of hybrid cells, but not myeloma cells. A preferred selection technique uses HAT (hypoxanthine, aminopterin, thymidine) selection. After a sufficient time, usually about 1 to 2 weeks, colonies of hybrids are observed. Single colonies are selected and their culture supernatants tested for binding activity against the polypeptide. Hybridomas having high reactivity and specificity are preferred.

[0860] Monoclonal antibodies may be isolated from the supernatants of growing hybridoma colonies. In addition, various techniques may be employed to enhance the yield, such as injection of the hybridoma cell line into the peritoneal cavity of a suitable vertebrate host, such as a mouse. Monoclonal antibodies may then be harvested from the ascites fluid or the blood. Contaminants may be removed from the antibodies by conventional techniques, such as chromatography, gel filtration, precipitation, and extraction. The polypeptides of this invention may be used in the purification process in, for example, an affinity chromatography step.

[0861] Within certain embodiments, the use of antigen-binding fragments of antibodies may be preferred. Such fragments include Fab fragments, which may be prepared using standard techniques. Briefly, immunoglobulins may be purified from rabbit serum by affinity chromatography on Protein A bead columns (Harlow and Lane, Antibodies: A Laboratory Manual, Cold Spring Harbor Laboratory, 1988) and digested by papain to yield Fab and Fc fragments. The Fab and Fc fragments may be separated by affinity chromatography on protein A bead columns.

[0862] Monoclonal antibodies of the present invention may be coupled to one or more therapeutic agents. Suitable agents in this regard include radionuclides, differentiation inducers, drugs, toxins, and derivatives thereof. Preferred radionuclides include ⁹⁰Y, ¹²³I, ¹²⁵I, ¹³¹I, ¹⁸⁶Re, ¹⁸⁸Re, ²¹¹At, and ²¹²Bi. Preferred drugs include methotrexate, and pyrimidine and purine analogs. Preferred differentiation inducers include phorbol esters and butyric acid. Preferred toxins include ricin, abrin, diptheria toxin, cholera toxin, gelonin, Pseudomonas exotoxin, Shigella toxin, and pokeweed antiviral protein.

[0863] A therapeutic agent may be coupled (e.g., covalently bonded) to a suitable monoclonal antibody either directly or indirectly (e.g., via a linker group). A direct reaction between an agent and an antibody is possible when each possesses a substituent capable of reacting with the other. For example, a nucleophilic group, such as an amino or sulfhydryl group, on one may be capable of reacting with a carbonyl-containing group, such as an anhydride or an acid halide, or with an alkyl group containing a good leaving group (e.g. a halide) on the other.

[0864] Alternatively, it may be desirable to couple a therapeutic agent and an antibody via a linker group. A linker group can function as a spacer to distance an antibody from an agent in order to avoid interference with binding capabilities. A linker group can also serve to increase the chemical reactivity of a substituent on an agent or an antibody, and thus increase the coupling efficiency. An increase in chemical reactivity may also facilitate the use of agents, or functional groups on agents, which otherwise would not be possible.

[0865] It will be evident to those skilled in the art that a variety of bifunctional or polyfunctional reagents, both homo- and hetero-functional (such as those described in the catalog of the Pierce Chemical Co., Rockford, Ill.), may be employed as the linker group. Coupling may be effected, for example, through amino groups, carboxyl groups, sulfhydryl groups or oxidized carbohydrate residues. There are numerous references describing such methodology, e.g., U.S. Pat. No. 4,671,958, to Rodwell et al.

[0866] Where a therapeutic agent is more potent when free from the antibody portion of the immunoconjugates of the present invention, it may be desirable to use a linker group which is cleavable during or upon internalization into a cell. A number of different cleavable linker groups have been described. The mechanisms for the intracellular release of an agent from these linker groups include cleavage by reduction of a disulfide bond (e.g., U.S. Pat. No. 4,489,710, to Spitler), by irradiation of a photolabile bond (e.g., U.S. Pat. No. 4,625,014, to Senter et al.), by hydrolysis of derivatized amino acid side chains (e.g., U.S. Pat. No. 4,638,045, to Kohn et al.), by serum complement-mediated hydrolysis (e.g. U.S. Pat. No. 4,671,958, to Rodwell et al.), and acid-catalyzed hydrolysis (e.g., U.S. Pat. No. 4,569,789, to Blattler et al.).

[0867] It may be desirable to couple more than one agent to an antibody. In one embodiment, multiple molecules of an agent are coupled to one antibody molecule. In another embodiment, more than one type of agent may be coupled to one antibody. Regardless of the particular embodiment, immunoconjugates with more than one agent may be prepared in a variety of ways. For example, more than one agent may be coupled directly to an antibody molecule, or linkers which provide multiple sites for attachment can be used. Alternatively, a carrier can be used.

[0868] A carrier may bear the agents in a variety of ways, including covalent bonding either directly or via a linker group. Suitable carriers include proteins such as albumins (e.g., U.S. Pat. No. 4,507,234, to Kato et al.), peptides and polysaccharides such as aminodextran (e.g., U.S. Pat. No. 4,699,784, to Shih et al.). A carrier may also bear an agent by noncovalent bonding or by encapsulation, such as within a liposome vesicle (e.g., U.S. Pat. Nos. 4,429,008 and 4,873,088). Carriers specific for radionuclide agents include radiohalogenated small molecules and chelating compounds. For example, U.S. Pat. No. 4,735,792 discloses representative radiohalogenated small molecules and their synthesis. A radionuclide chelate may be formed from chelating compounds that include those containing nitrogen and sulfur atoms as the donor atoms for binding the metal, or metal oxide, radionuclide. For example, U.S. Pat. No. 4,673,562, to Davison et al. discloses representative chelating compounds and their synthesis.

[0869] A variety of routes of administration for the antibodies and immunoconjugates may be used. Typically, administration will be intravenous, intramuscular, subcutaneous or in the bed of a resected tumor. It will be evident that the precise dose of the antibody/immunoconjugate will vary depending upon the antibody used, the antigen density on the tumor, and the rate of clearance of the antibody.

[0870] T Cells

[0871] Immunotherapeutic compositions may also, or alternatively, comprise T cells specific for a lung tumor protein. Such cells may generally be prepared in vitro or ex vivo, using standard procedures. For example, T cells may be isolated from bone marrow, peripheral blood, or a fraction of bone marrow or peripheral blood of a patient, using a commercially available cell separation system, such as the CEPRATE™ system, available from CellPro Inc., Bothell Wash. (see also U.S. Pat. No. 5,240,856; U.S. Pat. No. 5,215,926; WO 89/06280; WO 91/16116 and WO 92/07243). Alternatively, T cells may be derived from related or unrelated humans, non-human mammals, cell lines or cultures.

[0872] T cells may be stimulated with a lung tumor polypeptide, polynucleotide encoding a lung tumor polypeptide and/or an antigen presenting cell (APC) that expresses such a polypeptide. Such stimulation is performed under conditions and for a time sufficient to permit the generation of T cells that are specific for the polypeptide. Preferably, a lung tumor polypeptide or polynucleotide is present within a delivery vehicle, such as a microsphere, to facilitate the generation of specific T cells.

[0873] T cells are considered to be specific for a lung tumor polypeptide if the T cells kill target cells coated with the polypeptide or expressing a gene encoding the polypeptide. T cell specificity may be evaluated using any of a variety of standard techniques. For example, within a chromium release assay or proliferation assay, a stimulation index of more than two fold increase in lysis and/or proliferation, compared to negative controls, indicates T cell specificity. Such assays may be performed, for example, as described in Chen et al., Cancer Res. 54:1065-1070, 1994. Alternatively, detection of the proliferation of T cells may be accomplished by a variety of known techniques. For example, T cell proliferation can be detected by measuring an increased rate of DNA synthesis (e.g., by pulse-labeling cultures of T cells with tritiated thymidine and measuring the amount of tritiated thymidine incorporated into DNA). Contact with a lung tumor polypeptide (100 ng/ml-100 μg/ml, preferably 200 ng/ml-25 μg/ml) for 3-7 days should result in at least a two fold increase in proliferation of the T cells. Contact as described above for 2-3 hours should result in activation of the T cells, as measured using standard cytokine assays in which a two fold increase in the level of cytokine release (e.g., TNF or IFN-γ) is indicative of T cell activation (see Coligan et al., Current Protocols in Immunology, vol. 1, Wiley Interscience (Greene 1998)). T cells that have been activated in response to a lung tumor polypeptide, polynucleotide or polypeptide-expressing APC may be CD4⁺ and/or CD8⁺. Lung tumor protein-specific T cells may be expanded using standard techniques. Within preferred embodiments, the T cells are derived from either a patient or a related, or unrelated, donor and are administered to the patient following stimulation and expansion.

[0874] For therapeutic purposes, CD4⁺ or CD8⁺ T cells that proliferate in response to a lung tumor polypeptide, polynucleotide or APC can be expanded in number either in vitro or in vivo. Proliferation of such T cells in vitro may be accomplished in a variety of ways. For example, the T cells can be re-exposed to a lung tumor polypeptide, or a short peptide corresponding to an immunogenic portion of such a polypeptide, with or without the addition of T cell growth factors, such as interleukin-2, and/or stimulator cells that synthesize a lung tumor polypeptide. Alternatively, one or more T cells that proliferate in the presence of a lung tumor protein can be expanded in number by cloning. Methods for cloning cells are well known in the art, and include limiting dilution.

[0875] Pharmaceutical Compositions and Vaccines

[0876] Within certain aspects, polypeptides, polynucleotides, T cells and/or binding agents disclosed herein may be incorporated into pharmaceutical compositions or immunogenic compositions (i.e., vaccines). Pharmaceutical compositions comprise one or more such compounds and a physiologically acceptable carrier. Vaccines may comprise one or more such compounds and an immunostimulant. An immunostimulant may be any substance that enhances or potentiates an immune response to an exogenous antigen. Examples of immunostimulants include adjuvants, biodegradable microspheres (e.g., polylactic galactide) and liposomes (into which the compound is incorporated; see e.g., Fullerton, U.S. Pat. No. 4,235,877). Vaccine preparation is generally described in, for example, M. F. Powell and M. J. Newman, eds., “Vaccine Design (the subunit and adjuvant approach),” Plenum Press (NY, 1995). Pharmaceutical compositions and vaccines within the scope of the present invention may also contain other compounds, which may be biologically active or inactive. For example, one or more immunogenic portions of other tumor antigens may be present, either incorporated into a fusion polypeptide or as a separate compound, within the composition or vaccine.

[0877] A pharmaceutical composition or vaccine may contain DNA encoding one or more of the polypeptides as described above, such that the polypeptide is generated in situ. As noted above, the DNA may be present within any of a variety of delivery systems known to those of ordinary skill in the art, including nucleic acid expression systems, bacteria and viral expression systems. Numerous gene delivery techniques are well known in the art, such as those described by Rolland, Crit. Rev. Therap. Drug Carrier Systems 15:143-198, 1998, and references cited therein. Appropriate nucleic acid expression systems contain the necessary DNA sequences for expression in the patient (such as a suitable promoter and terminating signal). Bacterial delivery systems involve the administration of a bacterium (such as Bacillus-Calmette-Guerrin) that expresses an immunogenic portion of the polypeptide on its cell surface or secretes such an epitope. In a preferred embodiment, the DNA may be introduced using a viral expression system (e.g., vaccinia or other pox virus, retrovirus, or adenovirus), which may involve the use of a non-pathogenic (defective), replication competent virus. Suitable systems are disclosed, for example, in Fisher-Hoch et al., Proc. Natl. Acad. Sci. USA 86:317-321, 1989; Flexner et al., Ann. N.Y Acad. Sci. 569:86-103, 1989; Flexner et al., Vaccine 8:17-21, 1990; U.S. Pat. Nos. 4,603,112, 4,769,330, and 5,017,487; WO 89/01973; U.S. Pat. No. 4,777,127; GB 2,200,651; EP 0,345,242; WO 91/02805; Berkner, Biotechniques 6:616-627, 1988; Rosenfeld et al., Science 252:431-434, 1991; Kolls et al., Proc. Natl. Acad. Sci. USA 91:215-219, 1994; Kass-Eisler et al., Proc. Natl. Acad. Sci. USA 90:11498-11502, 1993; Guzman et al., Circulation 88:2838-2848, 1993; and Guzman et al., Cir. Res. 73:1202-1207, 1993. Techniques for incorporating DNA into such expression systems are well known to those of ordinary skill in the art. The DNA may also be “naked,” as described, for example, in Ulmer et al., Science 259:1745-1749, 1993 and reviewed by Cohen, Science 259:1691-1692, 1993. The uptake of naked DNA may be increased by coating the DNA onto biodegradable beads, which are efficiently transported into the cells.

[0878] While any suitable carrier known to those of ordinary skill in the art may be employed in the pharmaceutical compositions of this invention, the type of carrier will vary depending on the mode of administration. Compositions of the present invention may be formulated for any appropriate manner of administration, including for example, topical, oral, nasal, intravenous, intracranial, intraperitoneal, subcutaneous or intramuscular administration. For parenteral administration, such as subcutaneous injection, the carrier preferably comprises water, saline, alcohol, a fat, a wax or a buffer. For oral administration, any of the above carriers or a solid carrier, such as mannitol, lactose, starch, magnesium stearate, sodium saccharine, talcum, cellulose, glucose, sucrose, and magnesium carbonate, may be employed. Biodegradable microspheres (e.g., polylactate polyglycolate) may also be employed as carriers for the pharmaceutical compositions of this invention. Suitable biodegradable microspheres are disclosed, for example, in U.S. Pat. Nos. 4,897,268 and 5,075,109.

[0879] Such compositions may also comprise buffers (e.g., neutral buffered saline or phosphate buffered saline), carbohydrates (e.g., glucose, mannose, sucrose or dextrans), mannitol, proteins, polypeptides or amino acids such as glycine, antioxidants, chelating agents such as EDTA or glutathione, adjuvants (e.g., aluminum hydroxide) and/or preservatives. Alternatively, compositions of the present invention may be formulated as a lyophilizate. Compounds may also be encapsulated within liposomes using well known technology.

[0880] Any of a variety of immunostimulants may be employed in the vaccines of this invention. For example, an adjuvant may be included. Most adjuvants contain a substance designed to protect the antigen from rapid catabolism, such as aluminum hydroxide or mineral oil, and a stimulator of immune responses, such as lipid A, Bortadella pertussis or Mycobacterium tuberculosis derived proteins. Suitable adjuvants are commercially available as, for example, Freund's Incomplete Adjuvant and Complete Adjuvant (Difco Laboratories, Detroit, Mich.); Merck Adjuvant 65 (Merck and Company, Inc., Rahway, N.J.); aluminum salts such as aluminum hydroxide gel (alum) or aluminum phosphate; salts of calcium, iron or zinc; an insoluble suspension of acylated tyrosine; acylated sugars; cationically or anionically derivatized polysaccharides; polyphosphazenes; biodegradable microspheres; monophosphoryl lipid A and quil A. Cytokines, such as GM-CSF or interleukin-2, -7, or -12, may also be used as adjuvants.

[0881] Within the vaccines provided herein, the adjuvant composition is preferably designed to induce an immune response predominantly of the Th1 type. High levels of Th1-type cytokines (e.g., IFN-γ, IL-2 and IL-12) tend to favor the induction of cell mediated immune responses to an administered antigen. In contrast, high levels of Th2-type cytokines (e.g., IL-4, IL-5, IL-6, IL-10 and TNF-β) tend to favor the induction of humoral immune responses. Following application of a vaccine as provided herein, a patient will support an immune response that includes Th1- and Th2-type responses. Within a preferred embodiment, in which a response is predominantly Th1-type, the level of Th1-type cytokines will increase to a greater extent than the level of Th2-type cytokines. The levels of these cytokines may be readily assessed using standard assays. For a review of the families of cytokines, see Mosmann and Coffman, Ann. Rev. Immunol. 7:145-173, 1989.

[0882] Preferred adjuvants for use in eliciting a predominantly Th1-type response include, for example, a combination of monophosphoryl lipid A, preferably 3-de-O-acylated monophosphoryl lipid A (3D-MPL), together with an aluminum salt. MPL adjuvants are available from Ribi ImmunoChem Research Inc. (Hamilton, Mont.) (see U.S. Pat. Nos. 4,436,727; 4,877,611; 4,866,034 and 4,912,094). CpG-containing oligonucleotides (in which the CpG dinucleotide is unmethylated) also induce a predominantly Th1 response. Such oligonucleotides are well known and are described, for example, in WO 96/02555. Another preferred adjuvant is a saponin, preferably QS21, which may be used alone or in combination with other adjuvants. For example, an enhanced system involves the combination of a monophosphoryl lipid A and saponin derivative, such as the combination of QS21 and 3D-MPL as described in WO 94/00153, or a less reactogenic composition where the QS21 is quenched with cholesterol, as described in WO 96/33739. Other preferred formulations comprises an oil-in-water emulsion and tocopherol. A particularly potent adjuvant formulation involving QS21, 3D-MPL and tocopherol in an oil-in-water emulsion is described in WO 95/17210. Any vaccine provided herein may be prepared using well known methods that result in a combination of antigen, immunostimulant and a suitable carrier or excipient.

[0883] The compositions described herein may be administered as part of a sustained release formulation (i.e., a formulation such as a capsule or sponge that effects a slow release of compound following administration). Such formulations may generally be prepared using well known technology and administered by, for example, oral, rectal or subcutaneous implantation, or by implantation at the desired target site. Sustained-release formulations may contain a polypeptide, polynucleotide or antibody dispersed in a carrier matrix and/or contained within a reservoir surrounded by a rate controlling membrane. Carriers for use within such formulations are biocompatible, and may also be biodegradable; preferably the formulation provides a relatively constant level of active component release. The amount of active compound contained within a sustained release formulation depends upon the site of implantation, the rate and expected duration of release and the nature of the condition to be treated or prevented.

[0884] Any of a variety of delivery vehicles may be employed within pharmaceutical compositions and vaccines to facilitate production of an antigen-specific immune response that targets tumor cells. Delivery vehicles include antigen presenting cells (APCs), such as dendritic cells, macrophages, B cells, monocytes and other cells that may be engineered to be efficient APCs. Such cells may, but need not, be genetically modified to increase the capacity for presenting the antigen, to improve activation and/or maintenance of the T cell response, to have anti-tumor effects per se and/or to be immunologically compatible with the receiver (i.e., matched HLA haplotype). APCs may generally be isolated from any of a variety of biological fluids and organs, including tumor and peritumoral tissues, and may be autologous, allogeneic, syngeneic or xenogeneic cells.

[0885] Certain preferred embodiments of the present invention use dendritic cells or progenitors thereof as antigen-presenting cells. Dendritic cells are highly potent APCs (Banchereau and Steinman, Nature 392:245-251, 1998) and have been shown to be effective as a physiological adjuvant for eliciting prophylactic or therapeutic antitumor immunity (see Timmerman and Levy, Ann. Rev. Med. 50:507-529, 1999). In general, dendritic cells may be identified based on their typical shape (stellate in situ, with marked cytoplasmic processes (dendrites) visible in vitro), their ability to take up, process and present antigens with high efficiency, and their ability to activate naive T cell responses. Dendritic cells may, of course, be engineered to express specific cell-surface receptors or ligands that are not commonly found on dendritic cells in vivo or ex vivo, and such modified dendritic cells are contemplated by the present invention. As an alternative to dendritic cells, secreted vesicles antigen-loaded dendritic cells (called exosomes) may be used within a vaccine (see Zitvogel et al., Nature Med. 4:594-600, 1998).

[0886] Dendritic cells and progenitors may be obtained from peripheral blood, bone marrow, tumor-infiltrating cells, peritumoral tissues-infiltrating cells, lymph nodes, spleen, skin, umbilical cord blood or any other suitable tissue or fluid. For example, dendritic cells may be differentiated ex vivo by adding a combination of cytokines such as GM-CSF, IL-4, IL-13 and/or TNFα to cultures of monocytes harvested from peripheral blood. Alternatively, CD34 positive cells harvested from peripheral blood, umbilical cord blood or bone marrow may be differentiated into dendritic cells by adding to the culture medium combinations of GM-CSF, IL-3, TNFα, CD40 ligand, LPS, flt3 ligand and/or other compound(s) that induce differentiation, maturation and proliferation of dendritic cells.

[0887] Dendritic cells are conveniently categorized as “immature” and “mature” cells, which allows a simple way to discriminate between two well characterized phenotypes. However, this nomenclature should not be construed to exclude all possible intermediate stages of differentiation. Immature dendritic cells are characterized as APC with a high capacity for antigen uptake and processing, which correlates with the high expression of Fcγ receptor and mannose receptor. The mature phenotype is typically characterized by a lower expression of these markers, but a high expression of cell surface molecules responsible for T cell activation such as class I and class II MHC, adhesion molecules (e.g. CD54 and CD11) and costimulatory molecules (e.g., CD40, CD80 and CD86).

[0888] APCs may generally be transfected with a polynucleotide encoding a lung tumor protein (or portion or other variant thereof) such that the lung tumor polypeptide, or an immunogenic portion thereof, is expressed on the cell surface. Such transfection may take place ex vivo, and a composition or vaccine comprising such transfected cells may then be used for therapeutic purposes, as described herein. Alternatively, a gene delivery vehicle that targets a dendritic or other antigen presenting cell may be administered to a patient, resulting in transfection that occurs in vivo. In vivo and ex vivo transfection of dendritic cells, for example, may generally be performed using any methods known in the art, such as those described in WO 97/24447, or the gene gun approach described by Mahvi et al., Immunology and cell Biology 75:456-460, 1997. Antigen loading of dendritic cells may be achieved by incubating dendritic cells or progenitor cells with the lung tumor polypeptide, DNA (naked or within a plasmid vector) or RNA; or with antigen-expressing recombinant bacterium or viruses (e.g., vaccinia, fowlpox, adenovirus or lentivirus vectors). Prior to loading, the polypeptide may be covalently conjugated to an immunological partner that provides T cell help (e.g., a carrier molecule). Alternatively, a dendritic cell may be pulsed with a non-conjugated immunological partner, separately or in the presence of the polypeptide.

[0889] Cancer Therapy

[0890] In further aspects of the present invention, the compositions described herein may be used for immunotherapy of cancer, such as lung cancer. Within such methods, pharmaceutical compositions and vaccines are typically administered to a patient. As used herein, a “patient” refers to any warm-blooded animal, preferably a human. A patient may or may not be afflicted with cancer. Accordingly, the above pharmaceutical compositions and vaccines may be used to prevent the development of a cancer or to treat a patient afflicted with a cancer. A cancer may be diagnosed using criteria generally accepted in the art, including the presence of a malignant tumor. Pharmaceutical compositions and vaccines may be administered either prior to or following surgical removal of primary tumors and/or treatment such as administration of radiotherapy or conventional chemotherapeutic drugs.

[0891] Within certain embodiments, immunotherapy may be active immunotherapy, in which treatment relies on the in vivo stimulation of the endogenous host immune system to react against tumors with the administration of immune response-modifying agents (such as polypeptides and polynucleotides disclosed herein).

[0892] Within other embodiments, immunotherapy may be passive immunotherapy, in which treatment involves the delivery of agents with established tumor-immune reactivity (such as effector cells or antibodies) that can directly or indirectly mediate antitumor effects and does not necessarily depend on an intact host immune system. Examples of effector cells include T cells as discussed above, T lymphocytes (such as CD8⁺ cytotoxic T lymphocytes and CD4⁺ T-helper tumor-infiltrating lymphocytes), killer cells (such as Natural Killer cells and lymphokine-activated killer cells), B cells and antigen-presenting cells (such as dendritic cells and macrophages) expressing a polypeptide provided herein. T cell receptors and antibody receptors specific for the polypeptides recited herein may be cloned, expressed and transferred into other vectors or effector cells for adoptive immunotherapy. The polypeptides provided herein may also be used to generate antibodies or anti-idiotypic antibodies (as described above and in U.S. Pat. No. 4,918,164) for passive immunotherapy.

[0893] Effector cells may generally be obtained in sufficient quantities for adoptive immunotherapy by growth in vitro, as described herein. Culture conditions for expanding single antigen-specific effector cells to several billion in number with retention of antigen recognition in vivo are well known in the art. Such in vitro culture conditions typically use intermittent stimulation with antigen, often in the presence of cytokines (such as IL-2) and non-dividing feeder cells. As noted above, immunoreactive polypeptides as provided herein may be used to rapidly expand antigen-specific T cell cultures in order to generate a sufficient number of cells for immunotherapy. In particular, antigen-presenting cells, such as dendritic, macrophage or B cells, may be pulsed with immunoreactive polypeptides or transfected with one or more polynucleotides using standard techniques well known in the art. For example, antigen-presenting cells can be transfected with a polynucleotide having a promoter appropriate for increasing expression in a recombinant virus or other expression system. Cultured effector cells for use in therapy must be able to grow and distribute widely, and to survive long term in vivo. Studies have shown that cultured effector cells can be induced to grow in vivo and to survive long term in substantial numbers by repeated stimulation with antigen supplemented with IL-2 (see, for example, Cheever et al., Immunological Reviews 157:177, 1997).

[0894] Alternatively, a vector expressing a polypeptide recited herein may be introduced into antigen presenting cells taken from a patient and clonally propagated ex vivo for transplant back into the same patient. Transfected cells may be reintroduced into the patient using any means known in the art, preferably in sterile form by intravenous, intracavitary, intraperitoneal or intratumor administration.

[0895] Routes and frequency of administration of the therapeutic compositions disclosed herein, as well as dosage, will vary from individual to individual, and may be readily established using standard techniques. In general, the pharmaceutical compositions and vaccines may be administered by injection (e.g., intracutaneous, intramuscular, intravenous or subcutaneous), intranasally (e.g., by aspiration) or orally. Preferably, between 1 and 10 doses may be administered over a 52 week period. Preferably, 6 doses are administered, at intervals of 1 month, and booster vaccinations may be given periodically thereafter. Alternate protocols may be appropriate for individual patients. A suitable dose is an amount of a compound that, when administered as described above, is capable of promoting an anti-tumor immune response, and is at least 10-50% above the basal (i.e., untreated) level. Such response can be monitored by measuring the anti-tumor antibodies in a patient or by vaccine-dependent generation of cytolytic effector cells capable of killing the patient's tumor cells in vitro. Such vaccines should also be capable of causing an immune response that leads to an improved clinical outcome (e.g., more frequent remissions, complete or partial or longer disease-free survival) in vaccinated patients as compared to non-vaccinated patients. In general, for pharmaceutical compositions and vaccines comprising one or more polypeptides, the amount of each polypeptide present in a dose ranges from about 25 μg to 5 mg per kg of host. Suitable dose sizes will vary with the size of the patient, but will typically range from about 0.1 mL to about 5 mL.

[0896] In general, an appropriate dosage and treatment regimen provides the active compound(s) in an amount sufficient to provide therapeutic and/or prophylactic benefit. Such a response can be monitored by establishing an improved clinical outcome (e.g., more frequent remissions, complete or partial, or longer disease-free survival) in treated patients as compared to non-treated patients. Increases in preexisting immune responses to a lung tumor protein generally correlate with an improved clinical outcome. Such immune responses may generally be evaluated using standard proliferation, cytotoxicity or cytokine assays, which may be performed using samples obtained from a patient before and after treatment.

[0897] Methods for Detecting Cancer

[0898] In general, a cancer may be detected in a patient based on the presence of one or more lung tumor proteins, and/or polynucleotides encoding such proteins, in a biological sample (for example, blood, sera, urine, sputum and/or tumor biopsies) obtained from the patient. In other words, such proteins may be used as markers to indicate the presence or absence of a cancer such as lung cancer. In addition, such proteins may be useful for the detection of other cancers. The binding agents provided herein generally permit detection of the level of antigen that binds to the agent in the biological sample. Polynucleotide primers and probes may be used to detect the level of mRNA encoding a tumor protein, which is also indicative of the presence or absence of a cancer. In general, a lung tumor sequence should be present at a level that is at least three fold higher in tumor tissue than in normal tissue

[0899] There are a variety of assay formats known to those of ordinary skill in the art for using a binding agent to detect polypeptide markers in a sample. See, e.g., Harlow and Lane, Antibodies: A Laboratory Manual, Cold Spring Harbor Laboratory, 1988. In general, the presence or absence of a cancer in a patient may be determined by (a) contacting a biological sample obtained from a patient with a binding agent; (b) detecting in the sample a level of polypeptide that binds to the binding agent; and (c) comparing the level of polypeptide with a predetermined cut-off value.

[0900] In a preferred embodiment, the assay involves the use of binding agent immobilized on a solid support to bind to and remove the polypeptide from the remainder of the sample. The bound polypeptide may then be detected using a detection reagent that contains a reporter group and specifically binds to the binding agent/polypeptide complex. Such detection reagents may comprise, for example, a binding agent that specifically binds to the polypeptide or an antibody or other agent that specifically binds to the binding agent, such as an anti-immunoglobulin, protein G, protein A or a lectin. Alternatively, a competitive assay may be utilized, in which a polypeptide is labeled with a reporter group and allowed to bind to the immobilized binding agent after incubation of the binding agent with the sample. The extent to which components of the sample inhibit the binding of the labeled polypeptide to the binding agent is indicative of the reactivity of the sample with the immobilized binding agent. Suitable polypeptides for use within such assays include full length lung tumor proteins and portions thereof to which the binding agent binds, as described above.

[0901] The solid support may be any material known to those of ordinary skill in the art to which the tumor protein may be attached. For example, the solid support may be a test well in a microtiter plate or a nitrocellulose or other suitable membrane. Alternatively, the support may be a bead or disc, such as glass, fiberglass, latex or a plastic material such as polystyrene or polyvinylchloride. The support may also be a magnetic particle or a fiber optic sensor, such as those disclosed, for example, in U.S. Pat. No. 5,359,681. The binding agent may be immobilized on the solid support using a variety of techniques known to those of skill in the art, which are amply described in the patent and scientific literature. In the context of the present invention, the term “immobilization” refers to both noncovalent association, such as adsorption, and covalent attachment (which may be a direct linkage between the agent and functional groups on the support or may be a linkage by way of a cross-linking agent). Immobilization by adsorption to a well in a microtiter plate or to a membrane is preferred. In such cases, adsorption may be achieved by contacting the binding agent, in a suitable buffer, with the solid support for a suitable amount of time. The contact time varies with temperature, but is typically between about 1 hour and about 1 day. In general, contacting a well of a plastic microtiter plate (such as polystyrene or polyvinylchloride) with an amount of binding agent ranging from about 10 ng to about 10 μg, and preferably about 100 ng to about 1 μg, is sufficient to immobilize an adequate amount of binding agent.

[0902] Covalent attachment of binding agent to a solid support may generally be achieved by first reacting the support with a bifunctional reagent that will react with both the support and a functional group, such as a hydroxyl or amino group, on the binding agent. For example, the binding agent may be covalently attached to supports having an appropriate polymer coating using benzoquinone or by condensation of an aldehyde group on the support with an amine and an active hydrogen on the binding partner (see, e.g., Pierce Immunotechnology Catalog and Handbook, 1991, at A12-A13).

[0903] In certain embodiments, the assay is a two-antibody sandwich assay. This assay may be performed by first contacting an antibody that has been immobilized on a solid support, commonly the well of a microtiter plate, with the sample, such that polypeptides within the sample are allowed to bind to the immobilized antibody. Unbound sample is then removed from the immobilized polypeptide-antibody complexes and a detection reagent (preferably a second antibody capable of binding to a different site on the polypeptide) containing a reporter group is added. The amount of detection reagent that remains bound to the solid support is then determined using a method appropriate for the specific reporter group.

[0904] More specifically, once the antibody is immobilized on the support as described above, the remaining protein binding sites on the support are typically blocked. Any suitable blocking agent known to those of ordinary skill in the art, such as bovine serum albumin or Tween 20™ (Sigma Chemical Co., St. Louis, Mo.). The immobilized antibody is then incubated with the sample, and polypeptide is allowed to bind to the antibody. The sample may be diluted with a suitable diluent, such as phosphate-buffered saline (PBS) prior to incubation. In general, an appropriate contact time (i.e., incubation time) is a period of time that is sufficient to detect the presence of polypeptide within a sample obtained from an individual with lung cancer. Preferably, the contact time is sufficient to achieve a level of binding that is at least about 95% of that achieved at equilibrium between bound and unbound polypeptide. Those of ordinary skill in the art will recognize that the time necessary to achieve equilibrium may be readily determined by assaying the level of binding that occurs over a period of time. At room temperature, an incubation time of about 30 minutes is generally sufficient.

[0905] Unbound sample may then be removed by washing the solid support with an appropriate buffer, such as PBS containing 0.1% Tween 20™. The second antibody, which contains a reporter group, may then be added to the solid support. Preferred reporter groups include those groups recited above.

[0906] The detection reagent is then incubated with the immobilized antibody-polypeptide complex for an amount of time sufficient to detect the bound polypeptide. An appropriate amount of time may generally be determined by assaying the level of binding that occurs over a period of time. Unbound detection reagent is then removed and bound detection reagent is detected using the reporter group. The method employed for detecting the reporter group depends upon the nature of the reporter group. For radioactive groups, scintillation counting or autoradiographic methods are generally appropriate. Spectroscopic methods may be used to detect dyes, luminescent groups and fluorescent groups. Biotin may be detected using avidin, coupled to a different reporter group (commonly a radioactive or fluorescent group or an enzyme). Enzyme reporter groups may generally be detected by the addition of substrate (generally for a specific period of time), followed by spectroscopic or other analysis of the reaction products.

[0907] To determine the presence or absence of a cancer, such as lung cancer, the signal detected from the reporter group that remains bound to the solid support is generally compared to a signal that corresponds to a predetermined cut-off value. In one preferred embodiment, the cut-off value for the detection of a cancer is the average mean signal obtained when the immobilized antibody is incubated with samples from patients without the cancer. In general, a sample generating a signal that is three standard deviations above the predetermined cut-off value is considered positive for the cancer. In an alternate preferred embodiment, the cut-off value is determined using a Receiver Operator Curve, according to the method of Sackett et al., Clinical Epidemiology: A Basic Science for Clinical Medicine, Little Brown and Co., 1985, p. 106-7. Briefly, in this embodiment, the cut-off value may be determined from a plot of pairs of true positive rates (i.e., sensitivity) and false positive rates (100%-specificity) that correspond to each possible cut-off value for the diagnostic test result. The cut-off value on the plot that is the closest to the upper left-hand corner (i.e., the value that encloses the largest area) is the most accurate cut-off value, and a sample generating a signal that is higher than the cut-off value determined by this method may be considered positive. Alternatively, the cut-off value may be shifted to the left along the plot, to minimize the false positive rate, or to the right, to minimize the false negative rate. In general, a sample generating a signal that is higher than the cut-off value determined by this method is considered positive for a cancer.

[0908] In a related embodiment, the assay is performed in a flow-through or strip test format, wherein the binding agent is immobilized on a membrane, such as nitrocellulose. In the flow-through test, polypeptides within the sample bind to the immobilized binding agent as the sample passes through the membrane. A second, labeled binding agent then binds to the binding agent-polypeptide complex as a solution containing the second binding agent flows through the membrane. The detection of bound second binding agent may then be performed as described above. In the strip test format, one end of the membrane to which binding agent is bound is immersed in a solution containing the sample. The sample migrates along the membrane through a region containing second binding agent and to the area of immobilized binding agent. Concentration of second binding agent at the area of immobilized antibody indicates the presence of a cancer. Typically, the concentration of second binding agent at that site generates a pattern, such as a line, that can be read visually. The absence of such a pattern indicates a negative result. In general, the amount of binding agent immobilized on the membrane is selected to generate a visually discernible pattern when the biological sample contains a level of polypeptide that would be sufficient to generate a positive signal in the two-antibody sandwich assay, in the format discussed above. Preferred binding agents for use in such assays are antibodies and antigen-binding fragments thereof. Preferably, the amount of antibody immobilized on the membrane ranges from about 25 ng to about 1 μg, and more preferably from about 50 ng to about 500 ng. Such tests can typically be performed with a very small amount of biological sample.

[0909] Of course, numerous other assay protocols exist that are suitable for use with the tumor proteins or binding agents of the present invention. The above descriptions are intended to be exemplary only. For example, it will be apparent to those of ordinary skill in the art that the above protocols may be readily modified to use lung tumor polypeptides to detect antibodies that bind to such polypeptides in a biological sample. The detection of such lung tumor protein specific antibodies may correlate with the presence of a cancer.

[0910] A cancer may also, or alternatively, be detected based on the presence of T cells that specifically react with a lung tumor protein in a biological sample. Within certain methods, a biological sample comprising CD4⁺ and/or CD8⁺ T cells isolated from a patient is incubated with a lung tumor polypeptide, a polynucleotide encoding such a polypeptide and/or an APC that expresses at least an immunogenic portion of such a polypeptide, and the presence or absence of specific activation of the T cells is detected. Suitable biological samples include, but are not limited to, isolated T cells. For example, T cells may be isolated from a patient by routine techniques (such as by Ficoll/Hypaque density gradient centrifugation of peripheral blood lymphocytes). T cells may be incubated in vitro for 2-9 days (typically 4 days) at 37° C. with Mtb-81 or Mtb-67.2 polypeptide (e.g., 5-25 μg/ml). It may be desirable to incubate another aliquot of a T cell sample in the absence of lung tumor polypeptide to serve as a control. For CD4⁺ T cells, activation is preferably detected by evaluating proliferation of the T cells. For CD8⁺ T cells, activation is preferably detected by evaluating cytolytic activity. A level of proliferation that is at least two fold greater and/or a level of cytolytic activity that is at least 20% greater than in disease-free patients indicates the presence of a cancer in the patient.

[0911] As noted above, a cancer may also, or alternatively, be detected based on the level of mRNA encoding a lung tumor protein in a biological sample. For example, at least two oligonucleotide primers may be employed in a polymerase chain reaction (PCR) based assay to amplify a portion of a lung tumor cDNA derived from a biological sample, wherein at least one of the oligonucleotide primers is specific for (i.e., hybridizes to) a polynucleotide encoding the lung tumor protein. The amplified cDNA is then separated and detected using techniques well known in the art, such as gel electrophoresis. Similarly, oligonucleotide probes that specifically hybridize to a polynucleotide encoding a lung tumor protein may be used in a hybridization assay to detect the presence of polynucleotide encoding the tumor protein in a biological sample.

[0912] To permit hybridization under assay conditions, oligonucleotide primers and probes should comprise an oligonucleotide sequence that has at least about 60%, preferably at least about 75% and more preferably at least about 90%, identity to a portion of a polynucleotide encoding a lung tumor protein that is at least 10 nucleotides, and preferably at least 20 nucleotides, in length. Preferably, oligonucleotide primers and/or probes will hybridize to a polynucleotide encoding a polypeptide disclosed herein under moderately stringent conditions, as defined above. Oligonucleotide primers and/or probes which may be usefully employed in the diagnostic methods described herein preferably are at least 10-40 nucleotides in length. In a preferred embodiment, the oligonucleotide primers comprise at least 10 contiguous nucleotides, more preferably at least 15 contiguous nucleotides, of a DNA molecule having a sequence recited in SEQ ID NO: 1-782, 784 and 785. Techniques for both PCR based assays and hybridization assays are well known in the art (see, for example, Mullis et al., Cold Spring Harbor Symp. Quant. Biol., 51:263, 1987; Erlich ed., PCR Technology, Stockton Press, NY, 1989).

[0913] One preferred assay employs RT-PCR, in which PCR is applied in conjunction with reverse transcription. Typically, RNA is extracted from a biological sample, such as biopsy tissue, and is reverse transcribed to produce cDNA molecules. PCR amplification using at least one specific primer generates a cDNA molecule, which may be separated and visualized using, for example, gel electrophoresis. Amplification may be performed on biological samples taken from a test patient and from an individual who is not afflicted with a cancer. The amplification reaction may be performed on several dilutions of cDNA spanning two orders of magnitude. A two-fold or greater increase in expression in several dilutions of the test patient sample as compared to the same dilutions of the non-cancerous sample is typically considered positive.

[0914] In another embodiment, the disclosed compositions may be used as markers for the progression of cancer. In this embodiment, assays as described above for the diagnosis of a cancer may be performed over time, and the change in the level of reactive polypeptide(s) or polynucleotide evaluated. For example, the assays may be performed every 24-72 hours for a period of 6 months to 1 year, and thereafter performed as needed. In general, a cancer is progressing in those patients in whom the level of polypeptide or polynucleotide detected increases over time. In contrast, the cancer is not progressing when the level of reactive polypeptide or polynucleotide either remains constant or decreases with time.

[0915] Certain in vivo diagnostic assays may be performed directly on a tumor. One such assay involves contacting tumor cells with a binding agent. The bound binding agent may then be detected directly or indirectly via a reporter group. Such binding agents may also be used in histological applications. Alternatively, polynucleotide probes may be used within such applications.

[0916] As noted above, to improve sensitivity, multiple lung tumor protein markers may be assayed within a given sample. It will be apparent that binding agents specific for different proteins provided herein may be combined within a single assay. Further, multiple primers or probes may be used concurrently. The selection of tumor protein markers may be based on routine experiments to determine combinations that results in optimal sensitivity. In addition, or alternatively, assays for tumor proteins provided herein may be combined with assays for other known tumor antigens.

[0917] Diagnostic Kits

[0918] The present invention further provides kits for use within any of the above diagnostic methods. Such kits typically comprise two or more components necessary for performing a diagnostic assay. Components may be compounds, reagents, containers and/or equipment. For example, one container within a kit may contain a monoclonal antibody or fragment thereof that specifically binds to a lung tumor protein. Such antibodies or fragments may be provided attached to a support material, as described above. One or more additional containers may enclose elements, such as reagents or buffers, to be used in the assay. Such kits may also, or alternatively, contain a detection reagent as described above that contains a reporter group suitable for direct or indirect detection of antibody binding.

[0919] Alternatively, a kit may be designed to detect the level of mRNA encoding a lung tumor protein in a biological sample. Such kits generally comprise at least one oligonucleotide probe or primer, as described above, that hybridizes to a polynucleotide encoding a lung tumor protein. Such an oligonucleotide may be used, for example, within a PCR or hybridization assay. Additional components that may be present within such kits include a second oligonucleotide and/or a diagnostic reagent or container to facilitate the detection of a polynucleotide encoding a lung tumor protein.

[0920] The following Examples are offered by way of illustration and not by way of limitation.

### EXAMPLE 1

### Identification and Characterization of Lung Tumor Protein cDNAS

[0921] This Example illustrates the identification of cDNA molecules encoding lung tumor proteins.

[0922] A. Isolation of cDNA Sequences from Lung Adenocarcinoma Libraries Using Conventional cDNA Library Subtraction

[0923] A human lung adenocarcinoma cDNA expression library was constructed from poly A⁺ RNA from patient tissues (#40031486) using a Superscript Plasmid System for cDNA Synthesis and Plasmid Cloning kit (BRL Life Technologies, Gaithersburg, Md.) following the manufacturer's protocol. Specifically, lung carcinoma tissues were homogenized with polytron (Kinematica, Switzerland) and total RNA was extracted using Trizol reagent (BRL Life Technologies) as directed by the manufacturer. The poly A⁺ RNA was then purified using an oligo dT cellulose column as described in Sambrook et al., Molecular Cloning: A Laboratory Manual, Cold Spring Harbor Laboratories, Cold Spring Harbor, N.Y., 1989. First-strand cDNA was synthesized using the NotI/Oligo-dT18 primer. Double-stranded cDNA was synthesized, ligated with BstXI/EcoRI adaptors (Invitrogen, San Diego, Calif.) and digested with NotI. Following size fractionation with cDNA size fractionation columns (BRL Life Technologies), the cDNA was ligated into the BstXI/NotI site of pcDNA3.1 (Invitrogen) and transformed into ElectroMax E. coli DH10B cells (BRL Life Technologies) by electroporation. A total of 3×10⁶ independent colonies were generated.

[0924] Using the same procedure, a normal human cDNA expression library was prepared from a panel of normal tissue specimens, including lung, liver, pancreas, skin, kidney, brain and resting PBMC.

[0925] cDNA library subtraction was performed using the above lung adenocarcinoma and normal tissue cDNA libraries, as described by Hara et al. (Blood, 84:189-199, 1994) with some modifications. Specifically, a lung adenocarcinoma-specific subtracted cDNA library was generated as follows. The normal tissue cDNA library (80 μg) was digested with BamHI and XhoI, followed by a filling-in reaction with DNA polymerase Klenow fragment. After phenol-chloroform extraction and ethanol precipitation, the DNA was dissolved in 133 μl of H₂O, heat-denatured and mixed with 133 μl (133 μg) of Photoprobe biotin (Vector Laboratories, Burlingame, Calif.). As recommended by the manufacturer, the resulting mixture was irradiated with a 270 W sunlamp on ice for 20 minutes. Additional Photoprobe biotin (67 μl) was added and the biotinylation reaction was repeated. After extraction with butanol five times, the DNA was ethanol-precipitated and dissolved in 23 μl H₂O. The resulting DNA, plus other highly redundant cDNA clones that were frequently recovered in previous lung subtractions formed the driver DNA.

[0926] To form the tracer DNA, 10 μg lung adenocarcinoma cDNA library was digested with NotI and SpeI, phenol chloroform extracted and passed through Chroma spin-400 columns (Clontech, Palo Alto, Calif.). Typically, 5 μg of cDNA was recovered after the sizing column. Following ethanol precipitation, the tracer DNA was dissolved in 5 μl H₂O. Tracer DNA was mixed with 15 μl driver DNA and 20 μl of 2×hybridization buffer (1.5 M NaCl/10 mM EDTA/50 mM HEPES pH 7.5/0.2% sodium dodecyl sulfate), overlaid with mineral oil, and heat-denatured completely. The sample was immediately transferred into a 68° C. water bath and incubated for 20 hours (long hybridization [LH]). The reaction mixture was then subjected to a streptavidin treatment followed by phenol/chloroform extraction. This process was repeated three more times. Subtracted DNA was precipitated, dissolved in 12 μl H₂O, mixed with 8 μl driver DNA and 20 μl of 2×hybridization buffer, and subjected to a hybridization at 68° C. for 2 hours (short hybridization [SH]). After removal of biotinylated double-stranded DNA, subtracted cDNA was ligated into NotI/SpeI site of chloramphenicol resistant pBCSK⁺ (Stratagene, La Jolla, Calif.) and transformed into ElectroMax E. coli DH10B cells by electroporation to generate a lung adenocarcinoma specific subtracted cDNA library, referred to as LAT-S1 Similarly, LAT-S2 was generated by including 23 genes that were over-expressed in the tracer as additional drivers.

[0927] A second human lung adenocarcinoma cDNA expression library was constructed using adenocarcinoma tissue from a second patient (#86-66) and used to prepare a second lung adenocarcinoma-specific subtracted cDNA library (referred to as LAT2-S2), as described above, using the same panel of normal tissues and the additional genes over-expressed in LAT-S1.

[0928] A third human metastatic lung adenocarcinoma library was constructed from a pool of two lung pleural effusions with lung and gastric adenocarcinoma origins. The subtracted cDNA library, Mets-sub2 was generated as described above using the same panel of normal tissues. However, the Mets-sub3 subtracted library was constructed by including 51 additional genes as drivers. These 51 genes were recovered in Mets-sub2, representing over-expressed housekeeping genes in the testers. As a result, Mets-sub3 is more complexed and normalized.

[0929] A total of 16 cDNA fragments isolated from LAT-S1, 585 cDNA fragments isolated from LAT-S2, 568 cDNA clones from LAT2-S2, 15 cDNA clones from Mets-sub2 and 343 cDNA clones from Mets-sub3, described above, were colony PCR amplified and their mRNA expression levels in lung tumor, normal lung, and various other normal and tumor tissues were determined using microarray technology (Incyte, Palo Alto, Calif.). Briefly, the PCR amplification products were dotted onto slides in an array format, with each product occupying a unique location in the array. mRNA was extracted from the tissue sample to be tested, reverse transcribed, and fluorescent-labeled cDNA probes were generated. The microarrays were probed with the labeled cDNA probes, the slides scanned and fluorescence intensity was measured. This intensity correlates with the hybridization intensity. Seventy-three non-redundant cDNA clones, of which 42 were found to be unique, showed over-expression in lung tumors, with expression in normal tissues tested (lung, skin, lymph node, colon, liver, pancreas, breast, heart, bone marrow, large intestine, kidney, stomach, brain, small intestine, bladder and salivary gland) being either undetectable, or at significantly lower levels compared to lung adenocarcinoma tumors. These clones were further characterized by DNA sequencing with a Perkin Elmer/Applied Biosystems Division Automated Sequencer Model 373A and/or Model 377 (Foster City, Calif.).

[0930] The sequences were compared to known sequences in the gene bank using the EMBL GenBank databases (release 96). No significant homologies were found to the sequence provided in SEQ ID NO: 67, with no apparent homology to previously identified expressed sequence tags (ESTs). The sequences of SEQ ID NO: 60, 62, 65, 66, 69-71, 74, 76, 79, 80, 84, 86, 89-92, 95, 97 and 98 were found to show some homology to previously identified expressed sequence tags (ESTs). The cDNA sequences of SEQ ID NO: 59, 61, 63, 64, 67, 68, 72, 73, 75, 77, 78, 81-83, 85, 87, 88, 93, 94, 96, 99 and 100 showed homology to previously identified genes. The full-length cDNA sequences for the clones of SEQ ID NO: 96 and 100 are provided in SEQ ID NO: 316 and 318, respectively. The amino acid sequences for the clones of SEQ ID NO: 59, 61, 63, 64, 68, 73, 82, 83, 94, 96 and 100 are provided in SEQ ID NO: 331, 328, 329, 332, 327, 333, 330, 326, 325, 324 and 335, respectively.

[0931] The gene of SEQ ID NO: 84 (referred to as L551S) was determined by real-time RT-PCR analysis to be over-expressed in 2/9 primary adenocarcinomas and to be expressed at lower levels in 2/2 metastatic adenocarcinomas and 1/2 squamous cell carcinomas. No expression was observed in normal tissues, with the exception of very low expression in normal stomach.

[0932] B. isolation of cDNA Sequences from Lung Adenocarcinoma Libraries Using PCR-Based cDNA Library Subtraction

[0933] cDNA clones from a PCR-based subtraction library, containing cDNA from a pool of two human lung primary adenocarcinomas subtracted against a pool of nine normal human tissue cDNAs including skin, colon, lung, esophagus, brain, kidney, spleen, pancreas and liver, (Clontech, Palo Alto, Calif.) were derived and submitted to a first round of PCR amplification. This library (referred to as ALT-1) was subjected to a second round of PCR amplification, following the manufacturer's protocol. The expression levels of 760 cDNA clones in lung tumor, normal lung, and various other normal and tumor tissues, were examined using microarray technology as described above. A total of 118 clones, of which 55 were unique, were found to be over-expressed in lung tumor tissue, with expression in normal tissues tested (lung, skin, lymph node, colon, liver, pancreas, breast, heart, bone marrow, large intestine, kidney, stomach, brain, small intestine, bladder and salivary gland) being either undetectable, or at significantly lower levels. The sequences were compared to known sequences in the gene bank using the EMBL and GenBank databases (release 96). No significant homologies (including ESTs) were found to the sequence provided in SEQ ID NO: 44. The sequences of SEQ ID NO: 1, 11, 13, 15, 20, 23-27, 29, 30, 33, 34, 39, 41, 43, 45, 46, 51 and 57 were found to show some homology to previously identified expressed sequence tags (ESTs). The cDNA sequences of SEQ ID NO: 2-10, 12, 14, 16-19, 21, 22, 28, 31, 32, 35-38, 40, 42, 44, 47-50, 52-56 and 58 showed homology to previously identified genes. The full-length cDNA sequences for the clones of SEQ ID NO: 18, 22, 31, 35, 36 and 42 are provided in SEQ ID NO: 320, 319, 323, 321, 317, 321 and 322, respectively, with the corresponding amino acid sequences being provided in SEQ ID NO: 337, 336, 340, 338, 334, and 339, respectively.

[0934] Northern blot analyses of the genes of SEQ ID NO: 25 and 46 (referred to as L839P and L840P, respectively) were remarkably similar. Both genes were expressed in 1/2 lung adenocarcinomas as two bands of 3.6 kb and 1.6 kb. No expression of L839P was observed in normal lung or trachea. No expression of L840P was observed in normal bone marrow, resting or activated PBMC, esophagus, or normal lung. Given the similar expression patterns, L839P and L840P may be derived from the same gene.

[0935] Additional lung adenocarcinoma cDNA clones were isolated as follows. A cDNA library was prepared from a pool of two lung adenocarcinomas and subtracted against cDNA from a panel of normal tissues including lung, brain, liver, kidney, pancreas, skin, heart and spleen. The subtraction was performed using a PCR-based protocol (Clontech), which was modified to generate larger fragments. Within this protocol, tester and driver double stranded cDNA were separately digested with five restriction enzymes that recognize six-nucleotide restriction sites (MluI, MscI, PvuII, SalI and StuI). This digestion resulted in an average cDNA size of 600 bp, rather than the average size of 300 bp that results from digestion with RsaI according to the Clontech protocol. The ends of the restriction digested tester cDNA were filled in to generate blunt ends for adapter ligation. This modification did not affect the subtraction efficiency. Two tester populations were then created with different adapters, and the driver library remained without adapters. The tester and driver libraries were then hybridized using excess driver cDNA. In the first hybridization step, driver was separately hybridized with each of the two tester cDNA populations. This resulted in populations of (a) unhybridized tester cDNAs, (b) tester cDNAs hybridized to other tester cDNAs, (c) tester cDNAs hybridized to driver cDNAs and (d) unhybridized driver cDNAs. The two separate hybridization reactions were then combined, and rehybridized in the presence of additional denatured driver cDNA. Following this second hybridization, in addition to populations (a) through (d), a fifth population (e) was generated in which tester cDNA with one adapter hybridized to tester cDNA with the second adapter. Accordingly, the second hybridization step resulted in enrichment of differentially expressed sequences which could be used as templates for PCR amplification with adaptor-specific primers.

[0936] The ends were then filled in, and PCR amplification was performed using adaptor-specific primers. Only population (e), which contained tester cDNA that did not hybridize to driver cDNA, was amplified exponentially. A second PCR amplification step was then performed, to reduce background and further enrich differentially expressed sequences.

[0937] Fifty-seven cDNA clones were isolated from the subtracted library (referred to as LAP1) and sequenced. The determined cDNA sequences for 16 of these clones are provided in SEQ ID NO: 101-116. The sequences of SEQ ID NO: 101 and 114 showed no significant homologies to previously identified sequences. The sequences of SEQ ID NO: 102-109 and 112 showed some similarity to previously identified sequences, while the sequences of SEQ ID NO: 113, 115 and 116 showed some similarity to previously isolated ESTs.

[0938] C. isolation of cDNA sequences from Small Cell Lung Carcinoma Libraries Using PCR-Based cDNA Library Subtraction

[0939] A subtracted cDNA library for small cell lung carcinoma (referred to as SCL1) was prepared using essentially the modified PCR-based subtraction process described above. cDNA from small cell lung carcinoma was subtracted against cDNA from a panel of normal tissues, including normal lung, brain, kidney, liver, pancreas, skin, heart, lymph node and spleen. Both tester and driver poly A+ RNA were initially amplified using SMART PCR cDNA synthesis kit (Clontech, Palo Alto, Calif.). The tester and driver double stranded cDNA were separately digested with five restriction enzymes (DraI, MscI, PvuII, SmaI, and StuI). These restriction enzymes generated blunt end cuts and the digestion resulted in an average insert size of 600 bp. Digestion with this set of restriction enzymes eliminates the step required to generate blunt ends by filling in of the cDNA ends. These modifications did not affect subtraction efficiency.

[0940] Eighty-five clones were isolated and sequenced. The determined cDNA sequences for 31 of these clones are provided in SEQ ID NO: 117-147. The sequences of SEQ ID NO: 122, 124, 126, 127, 130, 131, 133, 136, 139 and 147 showed no significant homologies to previously identified sequences. The sequences of SEQ ID NO: 120, 129, 135, 137, 140, 142, 144 and 145 showed some similarity to previously identified gene sequences, while the sequences of SEQ ID NO: 114, 118, 119, 121, 123, 125, 128, 132, 134, 138, 141, 143 and 147 showed some similarity to previously isolated ESTs.

[0941] In further studies, three additional cDNA libraries were generated from poly A+ RNA from a single small cell lung carcinoma sample subtracted against a pool of poly A+ RNA from nine normal tissues (lung, brain, kidney, liver, pancreas, skin, heart pituitary gland and spleen). For the first library (referred to as SCL2), the subtraction was carried out essentially as described above for the LAP1 library, with the exception that the tester and driver were digested with PvuII, StuI, MscI and DraI. The ratio of tester and driver cDNA used was as recommended by Clontech. For the second library (referred to as SCL3), subtraction was performed essentially as for SCL2 except that cDNA for highly redundant clones identified from the SCL2 library was included in the driver cDNA. Construction of the SCL4 library was performed essentially as described for the SCL3 library except that a higher ratio of driver to tester was employed.

[0942] Each library was characterized by DNA sequencing and database analyses. The determined cDNA sequence for 35 clones isolated from the SCL2 library are provided in SEQ ID NO: 245-279, with the determined cDNA sequences for 21 clones isolated from the SCL3 library and for 15 clones isolated from the SCL4 library being provided in SEQ ID NO: 280-300 and 301-315, respectively. The sequences of SEQ ID NO: 246, 254, 261, 262, 304, 309 and 311 showed no significant homologies to previously identified sequences. The sequence of SEQ ID NO: 245, 248, 255, 266, 270, 275, 280, 282, 283, 288-290, 292, 295, 301 and 303 showed some homology to previously isolated ESTs, while the sequences of SEQ ID NO: 247, 249-253, 256-260, 263-265, 267-269, 271-274, 276-279, 281, 284-287, 291, 293, 294, 296-300, 302, 305-308, 310 and 312-315 showed some homology to previously identified gene sequences.

[0943] D. Isolation of cDNA Sequences from a Neuroendocrine Library Using PCR-Based cDNA Library Subtraction

[0944] Using the modified PCR-based subtraction process, essentially as described above for the LAP1 subtracted library, a subtracted cDNA library (referred to as MLN1) was derived from a lung neuroendocrine carcinoma that had metastasized to the subcarinal lymph node, by subtraction with a panel of nine normal tissues, including normal lung, brain, kidney, liver, pancreas, skin, heart, lymph node and spleen.

[0945] Ninety-one individual clones were isolated and sequenced. The determined cDNA sequences for 58 of these clones are provided in SEQ ID NO: 147-222. The sequences of SEQ ID NO: 150, 151, 154, 157, 158, 159, 160, 163, 174, 175, 178, 186-190, 192, 193, 195-200, 208-210, 212-215 and 220 showed no significant homologies to previously identified sequences. The sequences of SEQ ID NO: 152, 155, 156, 161, 165, 166, 176, 179, 182, 184, 185, 191, 194, 221 and 222 showed some similarity to previously identified gene sequences, while the sequences of SEQ ID NO: 148, 149, 153, 164, 167-173, 177, 180, 181, 183, 201-207, 211 and 216-219 showed some similarity to previously isolated ESTs.

[0946] The determined cDNA sequences of an additional 442 clones isolated from the MLN1 library are provided in SEQ ID NO: 341-782. [Please provide information on the “novelty” of these clones]

[0947] E. Isolation of cDNA Sequences from a Squamous Cell Lung Carcinoma Library Using PCR-Based cDNA Library Subtraction

[0948] A subtracted cDNA library for squamous cell lung carcinoma (referred to as SQL1) was prepared, essentially using the modified PCR-based subtraction process described above, except the tester and driver double stranded cDNA were separately digested with four restriction enzymes (DraI, MscI, PvuII and StuI) cDNA from a pool of two squamous cell lung carcinomas was subtracted against cDNA from a pool of 10 normal tissues, including normal lung, brain, kidney, liver, pancreas, skin, heart, spleen, esophagus and trachea.

[0949] Seventy-four clones were isolated and sequenced. The determined cDNA sequences for 22 of these clones are provided in SEQ ID NO: 223-244. The sequence of SEQ ID NO: 241 showed no significant homologies to previously identified sequences. The sequences of SEQ ID NO: 223, 225, 232, 233, 235, 238, 239, 242 and 243 showed some similarity to previously identified gene sequences, while the sequences of SEQ ID NO: 224, 226-231, 234, 236, 237, 240, 241 and 244 showed some similarity to previously isolated ESTs.

### EXAMPLE 2

### Synthesis of Polypeptides

[0950] Polypeptides may be synthesized on a Perkin Elmer/Applied Biosystems Division 430A peptide synthesizer using FMOC chemistry with HPTU (O-Benzotriazole-N,N,N′,N′-tetramethyluronium hexafluorophosphate) activation. A Gly-Cys-Gly sequence may be attached to the amino terminus of the peptide to provide a method of conjugation, binding to an immobilized surface, or labeling of the peptide. Cleavage of the peptides from the solid support may be carried out using the following cleavage mixture: trifluoroacetic acid:ethanedithiol:thioanisole:water:phenol (40:1:2:2:3). After cleaving for 2 hours, the peptides may be precipitated in cold methyl-t-butyl-ether. The peptide pellets may then be dissolved in water containing 0.1% trifluoroacetic acid (TFA) and lyophilized prior to purification by C18 reverse phase HPLC. A gradient of 0%-60% acetonitrile (containing 0.1% TFA) in water (containing 0.1% TFA) may be used to elute the peptides. Following lyophilization of the pure fractions, the peptides may be characterized using electrospray or other types of mass spectrometry and by amino acid analysis.

### EXAMPLE 3

### Preparation of Antibodies Against Lung Cancer Antigens

[0951] Polyclonal antibodies against the lung cancer antigen L773P (SEQ ID NO: 783) were prepared as follows.

[0952] Rabbits were immunized with recombinant protein expressed in and purified from E. Coli as described above. For the initial immunization, 400 μg of antigen combined with muramyl dipeptide (MDP) was injected subcutaneously (S.C.). Animals were boosted S.C. 4 weeks later with 200 μg of antigen mixed with incomplete Freund's Adjuvant (IFA). Subsequent boosts of 100 μg of antigen mixed with IFA were injected S.C. as necessary to induce high antibody titer responses. Serum bleeds from immunized rabbits were tested for L773P-specific reactivity using ELISA assays with purified protein. Polyclonal antibodies against L773P were affinity purified from high titer polyclonal sera using purified protein attached to a solid support.

### EXAMPLE 4

### Protein Expression of Lung Tumor-Specific Antigens

[0953] Full-length L773P (amino acids 2-364 of SEQ ID NO: 783), with a 6×His Tag, were subcloned into the pPDM expression vector and transformed into either BL21 CodonPlus or BL21 pLysS host cells using standard techniques. High levels of expression were observed in both cases. Similarly, the N-terminal portion of L773P (amino acids 2-71 of SEQ ID NO: 783; referred to as L773PA), with a 6×His tag were subcloned into the vector pPDM and transformed into BL21 CodonPlus host cells. Low levels of expression were observed by N-terminal sequencing. The sequence of the expressed constructs for L773P and L773PA are provided in SEQ ID NO: 784 and 785, respectively.

[0954] From the foregoing it will be appreciated that, although specific embodiments of the invention have been described herein for purposes of illustration, various modifications may be made without deviating from the spirit and scope of the invention. Accordingly, the invention is not limited except as by the appended claims.

1. An isolated polypeptide comprising at least an immunogenic portion of a lung tumor protein, or a variant thereof, wherein the tumor protein comprises an amino acid sequence that is encoded by a polynucleotide sequence selected from the group consisting of:
(a) sequences recited in any one of SEQ ID NO: 1, 11-13, 15, 20, 23-27, 29, 30, 33, 34, 39, 41, 43-46, 51, 52, 57, 58, 60, 62, 65-67, 69-71, 74, 76, 79, 80, 84, 86, 89-92, 95, 97, 98, 101, 110, 111, 113-119, 121-128, 130-134, 136, 138, 139, 141, 143, 146-151, 153, 154, 157-160, 162-164, 167-178, 180, 181, 183, 186-190, 192, 193, 195-220, 224, 226-231, 234, 236, 237, 240, 241, 244-246, 248, 254, 255, 261, 262, 266, 270, 275, 280, 282, 283, 288, 289, 290, 292, 295, 301, 303, 304, 309, 311, 341-782, 784 and 785;
(b) sequences that hybridize to a sequence of any one of SEQ ID NO: 1, 11-13, 15, 20, 23-27, 29, 30, 33, 34, 39, 41, 43-46, 51, 52, 57, 58, 60, 62, 65-67, 69-71, 74, 76, 79, 80, 84, 86, 89-92, 95, 97, 98, 101, 110, 111, 113-119, 121-128, 130-134, 136, 138, 139, 141, 143, 146-151, 153, 154, 157-160, 162-164, 167-178, 180, 181, 183, 186-190, 192, 193, 195-220, 224, 226-231, 234, 236, 237, 240, 241, 244-246, 248, 254, 255, 261, 262, 266, 270, 275, 280, 282, 283, 288, 289, 290, 292, 295, 301, 303, 304, 309, 311, 341-782, 784 and 785, under moderately stringent conditions; and
(c) a complement of a sequence of (a) or (b).

2. An isolated polypeptide according to claim 1, wherein the polypeptide comprises an amino acid sequence that is encoded by a polynucleotide sequence recited in any one of SEQ ID NO: 1, 11-13, 15, 20, 23-27, 29, 30, 33, 34, 39, 41, 43-46, 51, 52, 57, 58, 60, 62, 65-67, 69-71, 74, 76, 79, 80, 84, 86, 89-92, 95, 97, 98, 101, 110, 111, 113-119, 121-128, 130-134, 136, 138, 139, 141, 143, 146-151, 153, 154, 157-160, 162-164, 167-178, 180, 181, 183, 186-190, 192, 193, 195-220, 224, 226-231, 234, 236, 237, 240, 241, 244-246, 248, 254, 255, 261, 262, 266, 270, 275, 280, 282, 283, 288, 289, 290, 292, 295, 301, 303, 304, 309, 311, 341-782, 784 and 785, or a complement of any of the foregoing polynucleotide sequences.

3. An isolated polynucleotide encoding at least 15 amino acid residues of a lung tumor protein, or a variant thereof that differs in one or more substitutions, deletions, additions and/or insertions such that the ability of the variant to react with antigen-specific antisera is not substantially diminished, wherein the tumor protein comprises an amino acid sequence that is encoded by a polynucleotide comprising a sequence recited in any one of SEQ ID NO: 1, 11-13, 15, 20, 23-27, 29, 30, 33, 34, 39, 41, 43-46, 51, 52, 57, 58, 60, 62, 65-67, 69-71, 74, 76, 79, 80, 84, 86, 89-92, 95, 97, 98, 101, 110, 111, 113-119, 121-128, 130-134, 136, 138, 139, 141, 143, 146-151, 153, 154, 157-160, 162-164, 167-178, 180, 181, 183, 186-190, 192, 193, 195-220, 224, 226-231, 234, 236, 237, 240, 241, 244-246, 248, 254, 255, 261, 262, 266, 270, 275, 280, 282, 283, 288, 289, 290, 292, 295, 301, 303, 304, 309, 311, 341 782, 784 and 785, or a complement of any of the foregoing sequences.

4. An isolated polynucleotide encoding a lung tumor protein, or a variant thereof, wherein the tumor protein comprises an amino acid sequence that is encoded by a polynucleotide comprising a sequence recited in any one of SEQ ID NO: 1, 11-13, 15, 20, 23-27, 29, 30, 33, 34, 39, 41, 43-46, 51, 52, 57, 58, 60, 62, 65-67, 69-71, 74, 76, 79, 80, 84, 86, 89-92, 95, 97, 98, 101, 110, 111, 113-119, 121-128, 130-134, 136, 138, 139, 141, 143, 146-151, 153, 154, 157-160, 162-164, 167-178, 180, 181, 183, 186-190, 192, 193, 195-220, 224, 226-231, 234, 236, 237, 240, 241, 244-246, 248, 254, 255, 261, 262, 266, 270, 275, 280, 282, 283, 288, 289, 290, 292, 295, 301, 303, 304, 309, 311, 341-782, 784 and 785 or a complement of any of the foregoing sequences.

5. An isolated polynucleotide comprising a sequence recited in any one of SEQ ID NO: 1, 11-13, 15, 20, 23-27, 29, 30, 33, 34, 39, 41, 43-46, 51, 52, 57, 58, 60, 62, 65-67, 69-71, 74, 76, 79, 80, 84, 86, 89-92, 95, 97, 98, 101, 110, 111, 113-119, 121-128, 130-134, 136, 138, 139, 141, 143, 146-151, 153, 154, 157-160, 162-164, 167-178, 180, 181, 183, 186-190, 192, 193, 195-220, 224, 226-231, 234, 236, 237, 240, 241, 244-246, 248, 254, 255, 261, 262, 266, 270, 275, 280, 282, 283, 288, 289, 290, 292, 295, 301, 303, 304, 309, 311, 341-782, 784 and 785.

6. An isolated polynucleotide comprising a sequence that hybridizes to a sequence recited in any one of SEQ ID NO: 1, 11-13, 15, 20, 23-27, 29, 30, 33, 34, 39, 41, 43-46, 51, 52, 57, 58, 60, 62, 65-67, 69-71, 74, 76, 79, 80, 84, 86, 89-92, 95, 97, 98, 101, 110, 111, 113-119, 121-128, 130-134, 136, 138, 139, 141, 143, 146-151, 153, 154, 157-160, 162-164, 167-178, 180, 181, 183, 186-190, 192, 193, 195-220, 224, 226-231, 234, 236, 237, 240, 241, 244-246, 248, 254, 255, 261, 262, 266, 270, 275, 280, 282, 283, 288, 289, 290, 292, 295, 301, 303, 304, 309, 311, 341-782, 784 and 785 under moderately stringent conditions.

7. An isolated polynucleotide complementary to a polynucleotide according to any one of claims 3-6.

8. An expression vector comprising a polynucleotide according to any one of claims claim 3-6.

9. A host cell transformed or transfected with an expression vector according to claim 8.

10. An expression vector comprising a polynucleotide according claim 7.

11. A host cell transformed or transfected with an expression vector according to claim 10.

12. A pharmaceutical composition comprising a polypeptide according to claim 1, in combination with a physiologically acceptable carrier.

13. A vaccine comprising a polypeptide according to claim 1, in combination with an immunostimulant.

14. A vaccine according to claim 13, wherein immunostimulant is an adjuvant.

15. A vaccine according to claim 13, wherein immunostimulant induces a predominantly Type I response.

16. A pharmaceutical composition comprising a polynucleotide according to claim 3, in combination with a physiologically acceptable carrier.

17. A vaccine comprising a polynucleotide according to claim 3, in combination with a immunostimulant.

18. A vaccine according to claim 17, wherein the immunostimulant is an adjuvant.

19. A vaccine according to claim 17, wherein the immunostimulant induces a predominantly Type I response.

20. An isolated antibody, or antigen-binding fragment thereof, that specifically binds to a lung tumor protein that comprises an amino acid sequence that is encoded by a polynucleotide sequence recited in any one of SEQ ID NO: 1, 11-13, 15, 20, 23-27, 29, 30, 33, 34, 39, 41, 43-46, 51, 52, 57, 58, 60, 62, 65-67, 69-71, 74, 76, 79, 80, 84, 86, 89-92, 95, 97, 98, 101, 110, 111, 113-119, 121-128, 130-134, 136, 138, 139, 141, 143, 146-151, 153, 154, 157-160, 162-164, 167-178, 180, 181, 183, 186-190, 192, 193, 195-220, 224, 226-231, 234, 236, 237, 240, 241, 244-246, 248, 254, 255, 261, 262, 266, 270, 275, 280, 282, 283, 288, 289, 290, 292, 295, 301, 303, 304, 309, 311, 341-782, 784 and 785 or a complement of any of the foregoing polynucleotide sequences.

21. A pharmaceutical composition comprising an antibody or fragment thereof according to claim 17, in combination with a physiologically acceptable carrier.

22. A pharmaceutical composition comprising an antigen-presenting cell that expresses a polypeptide according to claim 1, in combination with a pharmaceutically acceptable carrier or excipient.

23. A pharmaceutical composition according to claim 22, wherein the antigen presenting cell is a dendritic cell or a macrophage.

24. A vaccine comprising an antigen-presenting cell that expresses a polypeptide according to claim 1, in combination with an immunostimulant.

25. A vaccine according to claim 24, wherein the immunostimulant is an adjuvant.

26. A vaccine according to claim 24, wherein the immunostimulant induces a predominantly Type I response.

27. A vaccine according to claim 24, wherein the antigen-presenting cell is a dendritic cell.

28. A method for inhibiting the development of a cancer in a patient, comprising administering to a patient an effective amount of a polypeptide according to claim 1, and thereby inhibiting the development of a cancer in the patient.

29. A method for inhibiting the development of a cancer in a patient, comprising administering to a patient an effective amount of a polynucleotide according to claim 3, and thereby inhibiting the development of a cancer in the patient.

30. A method for inhibiting the development of a cancer in a patient, comprising administering to a patient an effective amount of an antibody or antigen-binding fragment thereof according to claim 20, and thereby inhibiting the development of a cancer in the patient.

31. A method for inhibiting the development of a cancer in a patient, comprising administering to a patient an effective amount of an antigen-presenting cell that expresses a polypeptide according to claim 1, and thereby inhibiting the development of a cancer in the patient.

32. A method according to claim 31, wherein the antigen-presenting cell is a dendritic cell.

33. A method according to any one of claims 28-31, wherein the cancer is lung cancer.

34. A fusion protein comprising at least one polypeptide according to claim 1.

35. A fusion protein according to claim 34, wherein the fusion protein comprises an expression enhancer that increases expression of the fusion protein in a host cell transfected with a polynucleotide encoding the fusion protein.

36. A fusion protein according to claim 34, wherein the fusion protein comprises a T helper epitope that is not present within the polypeptide of claim 1.

37. A fusion protein according to claim 34, wherein the fusion protein comprises an affinity tag.

38. An isolated polynucleotide encoding a fusion protein according to claim 34.

39. A pharmaceutical composition comprising a fusion protein according to claim 31, in combination with a physiologically acceptable carrier.

40. A vaccine comprising a fusion protein according to claim 34, in combination with an immunostimulant.

41. A vaccine according to claim 40, wherein the immunostimulant is an adjuvant.

42. A vaccine according to claim 40, wherein the immunostimulant induces a predominantly Type I response.

43. A pharmaceutical composition comprising a polynucleotide according to claim 3, in combination with a physiologically acceptable carrier.

44. A vaccine comprising a polynucleotide according to claim 3, in combination with an immunostimulant.

45. A vaccine according to claim 44, wherein the immunostimulant is an adjuvant.

46. A vaccine according to claim 44, wherein the immunostimulant induces a predominantly Type I response.

47. A method for inhibiting the development of a cancer in a patient, comprising administering to a patient an effective amount of a pharmaceutical composition according to any one of claims 39 and 43.

48. A method for inhibiting the development of a cancer in a patient, comprising administering to a patient an effective amount of a vaccine according to any one of claims 40 and 44.

49. A method for removing tumor cells from a biological sample, comprising contacting a biological sample with T cells that specifically react with a lung tumor protein, wherein the tumor protein comprises an amino acid sequence that is encoded by a polynucleotide sequence selected from the group consisting of:
(i) polynucleotides recited in any one of SEQ ID NO: 1-782, 784 and 785; and
(ii) complements of the foregoing polynucleotides;
wherein the step of contacting is performed under conditions and for a time sufficient to permit the removal of cells expressing the antigen from the sample.

50. A method according to claim 49, wherein the biological sample is blood or a fraction thereof.

51. A method for inhibiting the development of a cancer in a patient, comprising administering to a patient a biological sample treated according to the method of claim 49.

52. A method for stimulating and/or expanding T cells specific for a lung tumor protein, comprising contacting T cells with one or more of:
(i) a polypeptide encoded by a polynucleotide comprising a sequence of any one of SEQ ID NO: 1-782, 784 and 785;
(ii) a polynucleotide encoding such a polypeptide; and/or
(iii) an antigen presenting cell that expresses such a polypeptide;
under conditions and for a time sufficient to permit the stimulation and/or expansion of T cells.

53. An isolated T cell population, comprising T cells prepared according to the method of claim 52.

54. A method for inhibiting the development of a cancer in a patient, comprising administering to a patient an effective amount of a T cell population according to claim 53.

55. A method for inhibiting the development of a cancer in a patient, comprising the steps of:
(a) incubating CD4⁺ and/or CD8⁺ T cells isolated from a patient with at least one component selected from the group consisting of:
(i) a polypeptide encoded by a polynucleotide comprising a sequence of any one of SEQ ID NO: 1-782, 784 and 785;
(ii) a polynucleotide encoding such a polypeptide; or
(iii) an antigen-presenting cell that expresses such a polypeptide;
such that T cells proliferate; and
(b) administering to the patient an effective amount of the proliferated T cells, and thereby inhibiting the development of a cancer in the patient.

56. A method for inhibiting the development of a cancer in a patient, comprising the steps of:
(a) incubating CD4⁺ and/or CD8+ T cells isolated from a patient with at least one component selected from the group consisting of:
(i) a polypeptide encoded by a polynucleotide comprising a sequence of any one of SEQ ID NO: 1-782, 784 and 785;
(ii) a polynucleotide encoding such a polypeptide; or
(iii) an antigen-presenting cell that expresses such a polypeptide;
such that T cells proliferate;
(b) cloning at least one proliferated cell; and
(c) administering to the patient an effective amount of the cloned T cells, and thereby inhibiting the development of a cancer in the patient.

57. A method for determining the presence or absence of a cancer in a patient, comprising the steps of:
(a) contacting a biological sample obtained from a patient with a binding agent that binds to a lung tumor protein, wherein the tumor protein comprises an amino acid sequence that is encoded by a polynucleotide sequence selected from the group consisting of:
(i) polynucleotides recited in any one of SEQ ID NO: 1-782, 784 and 785; and
(ii) complements of the foregoing polynucleotides;
(b) detecting in the sample an amount of polypeptide that binds to the binding agent; and
(c) comparing the amount of polypeptide to a predetermined cut-off value, and therefrom determining the presence or absence of a cancer in the patient.

58. A method according to claim 57, wherein the binding agent is an antibody.

59. A method according to claim 58, wherein the antibody is a monoclonal antibody.

60. A method according to claim 57, wherein the cancer is lung cancer.

61. A method for monitoring the progression of a cancer in a patient, comprising the steps of:
(a) contacting a biological sample obtained from a patient at a first point in time with a binding agent that binds to a lung tumor protein, wherein the tumor protein comprises an amino acid sequence that is encoded by a polynucleotide sequence recited in any one of SEQ ID NO: 1-782, 784 and 785 or a complement of any of the foregoing polynucleotides;
(b) detecting in the sample an amount of polypeptide that binds to the binding agent;
(c) repeating steps (a) and (b) using a biological sample obtained from the patient at a subsequent point in time; and
(d) comparing the amount of polypeptide detected in step (c) to the amount detected in step (b) and therefrom monitoring the progression of the cancer in the patient.

62. A method according to claim 61, wherein the binding agent is an antibody.

63. A method according to claim 62, wherein the antibody is a monoclonal antibody.

64. A method according to claim 61, wherein the cancer is a lung cancer.

65. A method for determining the presence or absence of a cancer in a patient, comprising the steps of:
(a) contacting a biological sample obtained from a patient with an oligonucleotide that hybridizes to a polynucleotide that encodes a lung tumor protein, wherein the tumor protein comprises an amino acid sequence that is encoded by a polynucleotide sequence recited in any one of SEQ ID NO: 1-782, 784 and 785 or a complement of any of the foregoing polynucleotides;
(b) detecting in the sample an amount of a polynucleotide that hybridizes to the oligonucleotide; and
(c) comparing the amount of polynucleotide that hybridizes to the oligonucleotide to a predetermined cut-off value, and therefrom determining the presence or absence of a cancer in the patient.

66. A method according to claim 65, wherein the amount of polynucleotide that hybridizes to the oligonucleotide is determined using a polymerase chain reaction.

67. A method according to claim 65, wherein the amount of polynucleotide that hybridizes to the oligonucleotide is determined using a hybridization assay.

68. A method for monitoring the progression of a cancer in a patient, comprising the steps of:
(a) contacting a biological sample obtained from a patient with an oligonucleotide that hybridizes to a polynucleotide that encodes a lung tumor protein, wherein the tumor protein comprises an amino acid sequence that is encoded by a polynucleotide sequence recited in any one of SEQ ID NO: 1-782, 784 and 785 or a complement of any of the foregoing polynucleotides;
(b) detecting in the sample an amount of a polynucleotide that hybridizes to the oligonucleotide;
(c) repeating steps (a) and (b) using a biological sample obtained from the patient at a subsequent point in time; and
(d) comparing the amount of polynucleotide detected in step (c) to the amount detected in step (b) and therefrom monitoring the progression of the cancer in the patient.

69. A method according to claim 68, wherein the amount of polynucleotide that hybridizes to the oligonucleotide is determined using a polymerase chain reaction.

70. A method according to claim 68, wherein the amount of polynucleotide that hybridizes to the oligonucleotide is determined using a hybridization assay.

71. A diagnostic kit, comprising:
(a) one or more antibodies according to claim 20; and
(b) a detection reagent comprising a reporter group.

72. A kit according to claim 71, wherein the antibodies are immobilized on a solid support.

73. A kit according to claim 72, wherein the solid support comprises nitrocellulose, latex or a plastic material.

74. A kit according to claim 71, wherein the detection reagent comprises an anti-immunoglobulin, protein G, protein A or lectin.

75. A kit according to claim 71, wherein the reporter group is selected from the group consisting of radioisotopes, fluorescent groups, luminescent groups, enzymes, biotin and dye particles.

76. An oligonucleotide comprising 10 to 40 contiguous nucleotides that hybridize under moderately stringent conditions to a polynucleotide that encodes a lung tumor protein, wherein the tumor protein comprises an amino acid sequence that is encoded by a polynucleotide sequence recited in any one of SEQ ID NO: 1, 11-13, 15, 20, 23-27, 29, 30, 33, 34, 39, 41, 43-46, 51, 52, 57, 58, 60, 62, 65-67, 69-71, 74, 76, 79, 80, 84, 86, 89-92, 95, 97, 98, 101, 110, 111, 113-119, 121-128, 130-134, 136, 138, 139, 141, 143, 146-151, 153, 154, 157-160, 162-164, 167-178, 180, 181, 183, 186-190, 192, 193, 195-220, 224, 226-231, 234, 236, 237, 240, 241, 244-246, 248, 254, 255, 261, 262, 266, 270, 275, 280, 282, 283, 288, 289, 290, 292, 295, 301, 303, 304, 309, 311, 341-782, 784 and 785 or a complement of any of the foregoing polynucleotides.

77. A oligonucleotide according to claim 76, wherein the oligonucleotide comprises 10-40 contiguous nucleotides recited in any one of SEQ ID NO: 1, 11-13, 15, 20, 23-27, 29, 30, 33, 34, 39, 41, 43-46, 51, 52, 57, 58, 60, 62, 65-67, 69-71, 74, 76, 79, 80, 84, 86, 89-92, 95, 97, 98, 101, 110, 111, 113-119, 121-128, 130-134, 136, 138, 139, 141, 143, 146-151, 153, 154, 157-160, 162-164, 167-178, 180, 181, 183, 186-190, 192, 193, 195-220, 224, 226-231, 234, 236, 237, 240, 241, 244-246, 248, 254, 255, 261, 262, 266, 270, 275, 280, 282, 283, 288, 289, 290, 292, 295, 301, 303, 304, 309, 311, 341-782, 784 and 785.

78. A diagnostic kit, comprising:
(a) an oligonucleotide according to claim 76; and
(b) a diagnostic reagent for use in a polymerase chain reaction or hybridization assay.

The application's sequence listing, which the Patent Office published only in electronic form, follows.

SEQUENCE LISTING (785 sequences)

SEQ ID NO: 1 - DNA, 527 bp, Homo sapien
ccaccagtccacaaatgtgactggtaagggatctagtaacagaggatggagttgggcagaatattatcctggatgatatgcacccagcactagaatacacctttcattagaatgaagagaacagacaaagccctcagaaaagatacaaaggcagagacattgattagaacattatctcataacagaggtggggccattacccaccattattgtaaaataactgtaactaaccaaaacacatacaggcttctttaatggagttaataaaactatggcacattgggaatcaggggcagaggtactgttcccagacggaaaactgggataaagggagccatgctgacagggccttattccagtctaggttgttagaaaggagccctagcccagaaatgacagcaaatagccataatcattatgtggggctgaaccagaggaagccaggctgagccaagaagctggaagtatcttgaacggctctccaaatccaaagattatccatactctttatccctccagcgatgtgt

SEQ ID NO: 2 - DNA, 490 bp, Homo sapien
ccaagagttctccactgtgaagactgaaaggacctggtgacatttcggcatcagtcctgttaccacttggaggtaacagaagcaggctcgtgtcctcctttaattctaccacactacatgactcgcaattggttctgaaattagaacgttcaccatcgtacttaaaatcttaggggcatgaagagtcagctagaacaaggaaaaagaaagtcgcaggtagtaggtaagtaggtgggcacatgaaaagccaagctgctctgtccaacaccagtgtacatgtgctttaactaaatgaactccagaggccaacagcagcagacctgctcaattcaccttccaaatcagaacaagaccaaaaagctcaggcttgagttgtcaactatgcataggttccgccagtgctgaggggtgtgaggctctagttgtgaagaagctacaagaaatcatgatgcatgtgatctgggccgcactggcatttgcagctattcag

SEQ ID NO: 3 - DNA, 464 bp, Homo sapien
ggagctgtgggctcagtcgtggggcagattgcaaagctcaagggctgcaaagttgttggagcagtagggtctgatgaaaaggttgcctaccttcaaaagcttggatttgatgtcgtctttaactacaagacggtagagtctttggaagaaaccttgaagaaagcgtctcctgatggttatgattgttattttgataatgtaggtggagagttttcaaacactgttatcggccagatgaagaaatttggaaggattgccatatgtggagccatctctacatataacagaaccggcccacttcccccaggcccacccccagagattgttatctatcaggagcttcgcatggaagcttttgtcgtctaccgctggcaaggagatgcccgccaaaaagctctgaaggacttgctgaaatgggtcttagagtttaaatttcagcttccctactttgtaattgactgact

SEQ ID NO: 4 - DNA, 510 bp, Homo sapien
ccttatcacactgtaagtggtccaagcccatagggatgctctttttggttcctggaatttccagttggatgtgacagagatctttcagtataggtctaagtcaagagtagcctctgggttgaggtgggctgggagattaacatcttacctggggtccttcagataaacctgttggtttttcctgtctcatacaggcccatcttaagttttgatgttgaattaaaactacttctacccccttagttataaaaaaggccacaaggagcatttatgtggatatctggaagtgagatagttattccattcccaggaaaagaaaaataaagctaagttacaaaactaaatctatatgcaataaagttattatatactgctttgtttaagcagagtcctctggaatttatgtacagtacattagttttcagctatttatattccacaagttagaccttaagattctctggttttaagacaattgttaaagatacttctaaagctctgagcagttca

SEQ ID NO: 5 - DNA, 452 bp, Homo sapien
acagcgcctcacgcacctgagccccgaggagaaggcgctgaggaggaaactgaaaaacagagtagcagctcagactgccagagatcgaaagaaggctcgaatgagtgagctggaacagcaagtggtagatttagaagaagagaaccaaaaacttttgctagaaaatcagcttttacgagagaaaactcatggccttgtagttgagaaccaggagttaagacagcgcttggggatggatgccctggttgctgaagaggaggcggaagccaaggtaaatcatctcctttatttggtgcctcatgtgagtactggttccaagtgacatgacccagcgattatgtttacagtctggacttctgatcaagagcgttcttgaaattttccttcagttttaagacattttcatgcaggcagagtgttcttcccctaaaggcacttgacactcatttttt

SEQ ID NO: 6 - DNA, 336 bp, Homo sapien
tatagagtgctgacatctgacattgagaaattcatgcctattgtttatactcccactgtgggtctggcttgccaacaatatagtttggtgtttcggaagccaagaggtctctttattactatccacgatcgagggcatattgcttcagttctcaatgcatggccagaagatgtcatcaaggccattgtggtgactgatggagagcgtattcttggcttgggagaccttggctgtaatggaatgggcatccctgtgggtaaattggctctatatacagcttgcggagggatgaatcctcaagaatgtctgcctgtcattctggatgtgggaaccgaa

SEQ ID NO: 7 - DNA, 376 bp, Homo sapien
ctgtgggaaacctcattgttctgtacaaagtactagctaaaccagaaaggtgattccaggaggagttagccaaacaacaacaaaaacaaaaaatgtgctgttcaagttttcagctttaagatatctttggataatgttatttctattttttattttttttcattagaagttaccaaattaagatggtaagacctctgagaccaaaattttgtcccatctctaccccctcacaactgcttacagaatggatcatgtcccccttatgttgaggtgaccacttaattgctttcctgcctccttgaaagaaagaaagaaagaagactgtgtttttgccactgatttagccatgtgaaactcatctcattacccttttctg

SEQ ID NO: 8 - DNA, 406 bp, Homo sapien
ggtagggagcaattctattatttggcattgcatggctgggttgaattaaaacagggagtgagaacaggtgagtctagaagtccaactctgaaaaggaccactgtacatttgaacacacggctgtgttaaagatgctgctaatgtcagtcactgggtgcactaaaggatctcttattttatgtaaaacgttgggattgacaagatagatctgatactctgttaagttaccctctgaagctacttcttgtgaaatactaatgacagcatcatcctgccaagcgaaagaggcaggcataagcaaggacaaattaaaagggggtaagagccttatcatgatgaggagtcttgttttgacatcttgggaaaagctgtccatagtgtgaagtcgtcaatttctcaccatggt

SEQ ID NO: 9 - DNA, 330 bp, Homo sapien
actactaccaagagctgcagagagacatttctgaaatgtttttgcagatttataaacaagggggttttctgggcctctccaatattaagttcaggccaggatctgtggtggtacaattgactctggccttccgagaaggtaccatcaatgtccacgacgtggagacacagttcaatcagtataaaacggaagcagcctctcgatataacctgacgatctcagacgtcagcgtgagtgatgtgccatttcctttctctgcccagtctggggctggggtgccaggctggggcatcgcgctgctggtgctggtctgtgttctggttgcgctgg

SEQ ID NO: 10 - DNA, 449 bp, Homo sapien
ctgacggctttgctgtcccagagccgcctaaacgcaagaaaagtcgatgggacagttagaggggatgtgctaaagcgtgaaatcagttgtccttaatttttagaaagattttggtaactaggtgtctcagggctgggttggggtccaaagtgtaaggaccccctgcccttagtggagagctggagcttggagacattaccccttcatcagaaggaattttcggatgttttcttgggaagctgttttggtccttggaagcagtgagagctgggaagcttcttttggctctaggtgagttgtcatgcgggtaagttgaggttatcttgggataaagggtcttctagggcacaaaactcactctaggtttatattgtatgtagcttatattttttactaaggtgtcaccttataagcatctataaattgagttctttttcttagttgtatgg

SEQ ID NO: 11 - DNA, 472 bp, Homo sapien
cctcgatgcatgctgctctacctctcatcagcccacagtctgacacgaggtcatctttggtctgtggtgaggtatggatgtctgcagtctacacaacagccctgcagaacgggcctggacaacccttgggggataagacagccacacatggctcaggctgttaggtgtccactgtcacagtccaaagagaaaggtacggcctccaagggggcagcttaagccaacatgtaagacttgggcacgatgaaaggacgggggtccagctacgaatgtttttgttcttgatgtcaagttgccagctactggaaggcaggagcagtttcttctttttcccactctgtgctgggtacttgggagaggcgaaataaataccagactgtccactcctcagcctaaggtccttctcaagtcctgcacactcagcacttgctctttaacgtggcatatgttcccccatcttcccctggtaatg

SEQ ID NO: 12 - DNA, 371 bp, Homo sapien
ttttttttttttttttttttttttggaratttgkcacattttattcagwatttctgctgcactgccagcctagggatgcacttgattcccaagaaatgcaactgtcctattcgcaragccgtccacaggtacctaccccctggactgcagcaactttattaccttaactagcacaraacagaggttgatttaaactccttacactcacttctcaratcaatgaatgggcaaaraaacmcctcatggctctgggaaggcatgctgaracccgtttttgcaagtcctgaggaatggaaraatatagctgccaggtatcccaagtctagggcagggagggkagtatcggcatcactttcactgcattctgttgg

SEQ ID NO: 13 - DNA, 493 bp, Homo sapien
  misc_feature (1)...(493): n = A,T,C or G
ccagtccaacctgctcctcattattgtataaatgagcagaatcaatatggcggaagccagctycaattgccaatttggtggcctctaaagctttacttttaggaacctctgcaggcgcataggtgccaaatcccaggacaggcatgaagtgaccatcattcagcttcacacactgatatttcgaatccatttctgtcnnnnnnnnnnnnnnnnnnnnnnnnnnnnnnnnnnnnnnnnnnccaacctgctcctcattattgtaaacatgtgcagaatcaatatggcggaacccagcttctattgctaattttgtgacctccaaagctttacttctcggaaccttggttcttccgagcgctcagcaatcccgccgagcttctttgagacgtcctcaggtgtcctttgacgatgcgtcctccactttcacacactctagcattccttcactggggtcttcattgccccacattgggcagccaggaatgttggggtg

SEQ ID NO: 14 - DNA, 540 bp, Homo sapien
ccagatggtccataatatgtcaccgagcaggtgaatggcatttgtatgtcagccttggttgtcttgtactccagggtggaagtcatggtatagagctgagtcactgggtccatttcctttttaaaattatgaccaccgctccttcaaggggatgtagcacttttccattcctgtaccatgtgatattgccatctggataactgtcttctgaaatgcagtcacccaacttttttagctgctctgtttcgagaaacagtgctttgcttacaatttcaggtttagatggttgcttgaacaccttgactattgtaggtgcctcaaacacgttgtcctcagttactagcatgcacacaaatctcttttcatcactgatccttgcattactgatagacaaagtgtagttttctgagaggttcaatctgtctttgtattctggtacatcgtcgtactgcacacttttctttgtagaggatctgaaggcaataaatactggggagccatcgggcttttcatatttccatttgcccaaacatgagattc

SEQ ID NO: 15 - DNA, 421 bp, Homo sapien
tacccacctccagcctcccatgtgagcctgtccttatgtatagtgtccaacctctgattctagcagtcaagtgtcttccccaatcctaatgtcccctgatatgtctctagcgacttgaccatctcttgttccttgggactggggccagcctcttgtctgcccacttccctctcattagtcagatagccccaaaggctctatctttagctcccagagaactttttggtcctcagtatttcccttcccctttccttcctattccccacaactgggggagggaagggagaacaggggcacctgatcatcaatctcccctgcccctctcttgaagccccctagatttggatgaagagcaggccagtgagcagggcaaagcctgctaggagcagaatgaccttgaggatcctttgctcagaactgg

SEQ ID NO: 16 - DNA, 236 bp, Homo sapien
gccgtgtgtgcttttcccagtgccgaggtacctatcgctcacggccaggagcttgtcgtggctgacagcaaagagctgctctctgtgggcctgcttcatctcatccgagaggccgtacaagaagtggtccattcctttgtctgaaggagcgacaggagcatctacggttgagaagacagaaagtttggcttcgtcgatgtcttgctgtgtgaattttccagacttagcccagtcga

SEQ ID NO: 17 - DNA, 424 bp, Homo sapien
ccagaaaggtgacagtggttttccagggcctcctgggcctccaggtccacctggtgaagtcattcagcctttaccaatcttgtcctccaaaaaaacgagaagacatactgaaggcatgcaagcagatgcagatgataatattcttgattactcggatggaatggaagaaatatttggttccctcaattccctgaaacaagacatcgagcatatgaaatttccaatgggtactcagaccaatccagcccgaacttgtaaagacctgcaactcagccatcctgacttcccagatggtgaatattggattgatcctaaccaaggttgctcaggagattccttcaaagtttactgtaatttcacatctggtggtgagacttgcatttatccagacaaaaaatctgagggagtaagaatttcatcatgg

SEQ ID NO: 18 - DNA, 154 bp, Homo sapien
gtcaccaactccttcagcgcctccacagggstttcggacatgacagcaaccttttctcccaggacaattgaaatttgctaaagggaaaggggaaagaaagggaaaagggagaaaaagaaacacaagagacttaaaggacaggaggaggagatgg

SEQ ID NO: 19 - DNA, 445 bp, Homo sapien
caacaaaattggtgaacacatggaagaacatggcatcaagtttataagacagttcgtaccaattaaagttgaacaaattgaagcagggacaccaggccgactcagagtagtagctcagtccaccaatagtgaggaaatcattgaaggagaatataatacggtgatgctggcaataggaagagatgcttgcacaagaaaaattggcttagaaaccgtaggggtgaagataaatgaaaagactggaaaaatacctgtcacagatgaagaacagaccaatgtgccttacatctatgccattggcgatatattggaggataaggtggagctcaccccagttgcaatccaggcaggaagattgctggctcagaggctctatgcaggttccactgtcaaagtgtgactatgaaaatgttccaaccactgtatttactcctttggaatatgg

SEQ ID NO: 20 - DNA, 211 bp, Homo sapien
gggtgccactgcctgcttgaaagcactttctgaacctacagaagttgggtattgtctgaaatcccagaggacccataagtgccggtgacaagctgtctgtcaggggagaggctccagaacctgggttcgtccccagtgagaccggaggatgatcccccaaggactgcgcagcatcagctcttggtgggcctctgccttctcttctgtttgg

SEQ ID NO: 21 - DNA, 396 bp, Homo sapien
tgcccctgtattggattgccacacggctcacattgcatgcaagtttgctgagctgaaggaaaagattgatcgccgttctggtaaaaagctggaagatggccctaaattcttgaagtctggtgatgctgccattgttgatatggttcctggcaagcccatgtgtgttgagagcttctcagactatccacctttgggtcgctttgctgttcgtgatatgagacagacagttgcggtgggtgtcatcaaagcagtggacaagaaggctgctggagctggcaaggtcaccaagtctgcccagaaagctcagaaggctaaatgaatattatccctaatacctgccaccccactcttaatcagtggtggaagaacggtctcagaactgtttgtttcaattgg

SEQ ID NO: 22 - DNA, 277 bp, Homo sapien
ggaaccatgtggccggcgcccttgatcgtgagaaaggcgatgtgggagaactccttcacgaagccggcaatctgctccccgctgtccccgtacttcactaaccagggccggcgctgcacctccatcttctggttgagggaatccacaaaccactcatcccccatgaaattgcaggccatgtctacatctccattatataataggatctgggatttctgtgagctaagcagcttcagatactgggagttcatgcttcggtagagacggcggtactgta

SEQ ID NO: 23 - DNA, 634 bp, Homo sapien
tctgaccatccatatccaatgttctcatttaaacattacccagcatcattgtttataatcagaaactctggtccttctgtctggtggcacttagagtcttttgtgccataatgcagcagtatggagggaggattttatggagaaatggggatagtcttcatgaccacaaataaataaaggaaaactaagctgcattgtgggttttgaaaaggttattatacttcttaacaattctttttttcagggacttttctagctgtatgactgttacttgaccttctttgaaaagcattcccaaaatgctctattttagatagattaacattaaccaacataattttttttagatcgagtcagcataaatttctaagtcagcctctagtcgtggttcatctctttcacctgcattttatttggtgtttgtctgaagaaaggaaagaggaaagcaaatacgaattgtactatttgtaccaaatctttgggattcattggcaaataatttcagtgtggtgtattattaaatagaaaaaaaaaattttgtttcctaggttgaaggtctaattgatacgtttgacttatgatgaccatttatgcactttcaaatgaatttgctttcaaaataaatgaagagcag

SEQ ID NO: 24 - DNA, 512 bp, Homo sapien
gcaaaacaagcctaagcaagcacaacgaagagcagaagtcagtgaaattaaaaagaggaaaaagaaaaatcataaaaatcataaaaagttatttctttgaaaagatcaatgaaatttagcaagactgacacagataaaaaggaattagacccaaatcagtgaacaggaatgaaatagaggatatcactacagaggctgcagccattgaaaggataattaggaaatcccacagataactttgtgctcataaatttgacaatgtagaggaaatatctttagttttaattagctttttattttagtttttctcaaaaactaaaacttaataaaactcaaccaagacaaaatagacaatcagaatgtaggcatacctcagagatgtggcggatttggtttcagactactgcaataaaccaaatatggcaataaaaggagtcacagaaagtggtttcccagtgtatatatataaaagttacatttactctatgaagtgcaataacattttgtctaaa

SEQ ID NO: 25 - DNA, 461 bp, Homo sapien
ctctgtttcagcacctcattgggattattgaactcattaaattctttacatgaacttgaattgttcattgaaatctctagccatttccctggttaaacaggataatctttttttttcactaaagaacattcgtggtggtttagtgatgaggttaatattcccctcttgtccacctccacattggaaaaaccacgttggactgagttttgaggagcaaagaactaatcacttgaccaaaggggccctgtatccccacaagccctgggtatttttctctcatagagagaagagggtctgtatggatacctgaaaatgtgattttatatattcttggcatccaggggagaaaaatcaaaaagcaaggaagttacagttatctccccagaaattaatgggtcatgtcaagactataggttttcatttccttctgttgcttgttagaatgatgttcttgtgggaaa

SEQ ID NO: 26 - DNA, 317 bp, Homo sapien
tgctggagtcggaactgctgcctttgtttggcggccttgtttcttaaatcagttccctcttaggatttattacactaaaaaaaaattagtttttgaaaagaaataggagaatacagaaacatgaatttcacgaggctatcatctaacagtgggggctttctacacacgtggtgccaaaatgtgtcattctgagtcaattgcaattcctctctaggagtgaaaagagataaaagataagccaagaaccctggacagattcttggtgttggtgacaaagaggaaaggacctgagaatggggctggtggggagagggggg

SEQ ID NO: 27 - DNA, 250 bp, Homo sapien
taattgctgtgattattagaattctatcatgactgtattgtagtttttgctctattycagataagcmagatctaagaagttatcaaaactattctttaaaatgctaaagcaggtaactttttcttccattattttttcctcctaccactgagttttgtaatgaattccttgtgtatacaagcaatacaggtgaatactaaactgttatttttagcttcttcaaaagctattttagaaagcttcctggaaa

SEQ ID NO: 28 - DNA, 532 bp, Homo sapien
cctatatcattcatttatacagaagctgcttgctgcttagcaagttggtgggtttgattttccttggttgctttgcagacctcccttgagaggattccttctggatggagatttctttgttgctgtctcccttgccacaactctgaccaagattgcattgcgctatgtagctttggttcaggagaagaaaaagcaaaattcttttgttgctgaggctatgttgctcatggctactatcctgcatttgggaaaatcctctcttcctaagaagccaattactgatgatgatgtggatcgaatttccctgtgcctcaaggtcttgtctgaatgttcacctttaatgaatgacattttcaataaggaatgcagacagtccctttctcacatgttatctgctaaactagaagaagagaaattatcccaaaagaaagaatctgaaaagaggaatgtgacagtacagcctgatgaccccatttccttcatgcaactaactgctaagaatgaaatgaactgcaaggaagatcagtttcag

SEQ ID NO: 29 - DNA, 486 bp, Homo sapien
ctgtttttggacttaattaacywttgcaagtggaaaccaagaaataattgtagcataactctctctattgtcatgttgcttctttctgcaaatatatcttacaagttagactttaaacctttgatctcccacaccaaaagagaaaataatatttatatggaagtaattttattttagtgtttgtgatttattgtggagagcaggbgtttaaaaattttagaatttctttttaacaaaatcaaatacattgttaaggtaacaaagaataattcactatttcagcatttcaaagcaacatattctacaacttcaaagatatttgcaaaaataatacaactgttgaagttcaaatgttatggaaagaaacattagaagtatgaaaagtggtacaaaaacatgtttctttttattctcttggatatatatctatatatttaggaaaatacatatatgtatgtgtatgtatatatatgtatgaaaatatac

SEQ ID NO: 30 - DNA, 240 bp, Homo sapien
aagacctgaggaaggaaaacaaattggcttcctgctgaagaakcaaaatagacattttttaatgtctcttgaccccagttccaagttcaccctgttgcctgttcttcctcccaccttttggggttctataactgcatcccccacacatctttcaccaccaccccatacataccagctctcctgttgtgggattcaggacataggaagagttgctgaaggcacgggtgcttttgggattcg

SEQ ID NO: 31 - DNA, 233 bp, Homo sapien
ccattgatgcaggatatcggcacattgactgtgcctatgtctatcagaatgaacatgaagtgggggaagccatccaagagaagatccaagagaaggctgtgaagcgggaggacctgttcatcgtcagcaagttgtggcccactttctttgagagaccccttgtgaggaaagcctttgagaagaccctcaaggacctgaagctgagctatctggacgtctatcttattcactgg

SEQ ID NO: 32 - DNA, 233 bp, Homo sapien
gaggaatgctggactggaggcccctggagccagatggcaagagggtgacagcttcctttcctgtgtgtactctgtccagttcctttagaaaaaatggatgcccagaggactcccaaccctggcttggggtcaagaaacagccagcaagagttaggggccttagggcactgggctgttgttccattgaagccgactctggccctggcccttacttgcttctctagctctctagg

SEQ ID NO: 33 - DNA, 319 bp, Homo sapien
ctgggcctggatggtctaggatagccttactcacttgcctggcaggtgacaggctgttggctggaattgcttggttctcctccatgtggcctctccagtaggctagctcaggcttattcacatgatggcttcaggattccaaagagagtgagagtagaagctgaaagacttcttgagttcttggcctggaactgggactaggacagtgtcacttctgctaagttcttttggtcagagcaaatcacaaggctttacccagattcaagggatgagaaacagactacatgtcttgatgaggggaaccacaaagagcttgtgg

SEQ ID NO: 34 - DNA, 340 bp, Homo sapien
tacagatttaattcatgttattaactccctgccttttacctcctccctcctcccttggcacaactgccagatggatgtggctggaagtcagaggacattctcgtgggttcgtgggcctagggtacaaatgacctcagcgtgacagcaaacaggacagagaagaccaggctcttactcaggaatccaccagccaggagaatgacaatgttgaacaccggaaccctgatgatatctgtcacatttgtaaggttgatttcagagtcaggagtggagacatcggcagttgacttgggtggagcttgggtcacagttctggggctggtatagagtgggcacaagg

SEQ ID NO: 35 - DNA, 170 bp, Homo sapien
acatgggtccttcactcctcgctgagatgttgcggcagccttttcttccaatgcggttgtggcaggagaatccacggatgtaatgttttcacctttttccctgagggtgctttctgaggaaccagyccttaagaggtggggtcttggattcctgacccaggcgtccggca

SEQ ID NO: 36 - DNA, 475 bp, Homo sapien
ctgtttttggacttaattaaccattgcaagtggaaaccaagaaataattgtagcataactctctctattgkcatgttgcttctttctgcaaatatatcttagaagttagactttaaacctttgatctcccacaccaaaagagaaaataatatttatatggaagtaattttattttagtgtttgtgatttattgtggagagcaggtgtttaaaaattttagaatttctttaacaaaattctaaagagaaaataaaaaagaaatcacagtatttacagagataacagaatggcttagccatgcaaaacaaataactttggtttttccccttttactttggtttaaatgttgaccaagattcaattttttttcctgccaaataaaacttcaataaaagtttagaggcaaaataacgtattttctttttttcccataatattttatacagcatcgagtctaagaatattttatgcattt

SEQ ID NO: 37 - DNA, 246 bp, Homo sapien
ccttgagcttgggccgggcactgaggcgccccacatatgctgagagcagggggaacgcatccaggcagccaggggctaggacctcatggatcagcagcaagtccagcaggttgtagtcagcgaaggagatctggtctcccacaatgaaggtcttgcctccctggttctgggacagcagggtctcaaaaggcttcagttgcccgggcagtgccttcacatagtcatccttgcccacctcatagttgg

SEQ ID NO: 38 - DNA, 512 bp, Homo sapien
gctggaagtgaaatgcagatcagacccattgtgatgtcacagaaagatggggacaggccaaagaaaaaagtgactttcaactcttcttccatcatttttatcatcaccagtgatgaatcactgtcagttgacgacagcgacaaaaccaatgggtccaaagttgatgtaatccaagttcgtcctttgtaggaatgaagaatggcaacgaaagatggggccttaaattggatgccacttttggactttcatcataagaagtgtctggaatacccgttctatgtaatatcaacagaaccttgtggtccagcaggaaatccgaattgcccatatgctcttgggcctcaggaagaggttgaacaaaaacaaattcttttaattcaacgggtgctttacataatgaaaaaaccacttgtggcacacgatgggcatctaacatcatcatcttctaatgtgttggagattttcatttcaaatatattttttaaattactctattttccaaaacacgtaat

SEQ ID NO: 39 - DNA, 370 bp, Homo sapien
ttttatgaacaagatataaggatcaaaaaaaagggtgttgatatgtttttccaagcagagatgtactcgactctgtcctatttagccttcccatacctgacttctaatcacttttcctggtgccctyccatctccctaaccccccctcacagggatgcctcctcccaaggctccagaaactctgaccctcgcactgctggagggagcccatgaattgctggtcaatatcgctcatcctctakactccatcctgcgtgtgcttcttcctacaagagctagagaggcactgactgataaatacctgtcacctgcccctttcccagagggtgaaactccacccactcccactgcagaaatgaatcttaaatgg

SEQ ID NO: 40 - DNA, 204 bp, Homo sapien
cctgagggttttccctttaaattttcattgagttgtccatctccagcatatagggcttcaggagcagagcagaccttgtttttagtggttccatgggataaaatgggattggaggagctagaagaattcagggtctggtccaatctgccagtcttcctgaaatatcgaaaatacaccagggctgctatatcagagccaccctgg

SEQ ID NO: 41 - DNA, 447 bp, Homo sapien
caggcagcaattcgtaaagaattaaatgagtacaaaagtaatgaaatggaggtacatgcatcaagcaagcacttgacaagattccacaggccatagagattttcttctgagaagaatttgtgtttaattttttgataccaacactgaacattcatcagggaactttcctgaagttcagctcaagactaccctacctgctgtgtttgtgagaagagtaggatcacacacacaggtgcaatcttgaccacacttacctgcaagaggagtaaccagaggacacacttccttccttctttggtgtctgaggagtgtgaactgttggggtcagttaagacccaacataactctatcagaagaaaactgttgtttgcctttcaaccttgttttacagttctgcagtgtagtggaggacgggcaacgtgcatgtgcaggctcaccactcccagg

SEQ ID NO: 42 - DNA, 498 bp, Homo sapien
ctggttttgtaaaaacagtctctttattctactgtgctgaaaccctcaccaatatagaaaattagattctcattgcactgaactatatttatatgcctaagtatgtagaagtaaaattatataccccaaaaggattttatcttgttgtatatattaaatgttatttctgcatatagggtcttttatggagaaactgatgatgataagcttaatactcacttgtttagcagcatctgaatgcacaaatgctttatatatctcttctgctttacagggcaaaagatcagactctgttttcttatagtcttcacaagccagccagaactcaatattctcctcactgaattcagactttaggaaacttccaaagacattttgaccagtttggttggcaagaagtttttccagagattgagaccattgcattacttcagcagcagaaagtacatccttggacttggaagatttcattccagattccagatgtgggatcataga

SEQ ID NO: 43 - DNA, 312 bp, Homo sapien
caggaaggcggccaagaatgtgagtgcaaagattggttcctgagagccccgagaagaaaattcatgacagtgtctgggctgccaaagaagcagtgcccctgtgatcatttcaagggcaatgtgaagaaaacaagacaccaaaggcaccacagaaagccaaacaagcattccagagcctgccagcaatttctcaaacaatgtcagctaagaagctttgctctgcctttgtaggagctctgagcgcccactcttccaattaaacattctcagccaagaagacagtgagcacacctaccagacactcttcttctc

SEQ ID NO: 44 - DNA, 417 bp, Homo sapien
ctaacacatttactctccactattcgtactctggtagccatgttaaccccatcagagattccttctcaagccatgtctcagagctgagaggcatcccagcaagttttgcagctcacagttttttccgtaaattacttattctataaaattggagtaggccataaactttggagggccctagaccaattttttggattatttttcgtcttctatcattccgctgatcttagatattctctgcattaaatattaaatatcacttctaggctgaaaaatccccctaaaaatatttctagctcagatttttcctccaaattctgcaatagaagatcacaatgtgaactctgcatctccatgttaaagtctaatggacattcacacttagcatgtctcaaagaaatctcatgtaaaccatgg

SEQ ID NO: 45 - DNA, 494 bp, Homo sapien
cgcgtgtctgtggtatgtgtacacgtgcatgttctgcatgtctgtaggtcacacatgctttggtgcatgtacacgtgtgtgtgtgtatgcgtgtaggagctcacacttgtgtacacgtttgtgtgcatgcatgtgtgcaggagcttgcacgtttgtggtgggtacatgtacatatgtgagtgatcctgtgtgcaagcccccatgtggacatggctatgagtgagcgtggagccaaaagccaggtaacacgcatgcagcaggcccactgtgcgtgtctgagacggtctgtggcagggactgggtgtgaatcatgcagcaggcccactgtgcgtgtctgagacggtctgtggcagggactgggtgtgaatcagtgaccgtgtctctgaccaacatgctgaattacaaattgataatttattaacctgtgcagcaacaaataagatttttcaaaactcaacaaagtgctcaaagttgacattacttgcttcaaagtt

SEQ ID NO: 46 - DNA, 516 bp, Homo sapien
ccagtccaacctgctcctcattattgtataaatgagcagaatctatatggcggaacccagcttctattgctaattttgtgacctccaaagctttacttctcggaacctcctcctttggccgtcatttgatcattcaactctttgtcagtggcaactcccgctattttggtgtgttggtttgttactacacagtgagcacaaacatggtggtccaatacagaggctcttcctgtcaggtgtcaaccagaaagttcatctaacactgtgatatttgcatccttcttgaacagttgttggctgaagattcatttgatgaatcgatttttcaaaagagatgattcttggttcttccgagcgctcagctctcccgccgagcttctttgagacgtcctcaggtgtcctttgacgatgcgtcctccactttcacacactctagcattccttcactggggtcttcattgccccacattgggcagccaggaatgttggggtgatcagacacaacaccaggtcatg

SEQ ID NO: 47 - DNA, 459 bp, Homo sapien
ccaattcagagtggcattctgcatttctgtggcttccaagtcttagaacctcaactgacatatagcattgggcacactccagcagacgcccgaattcaaatcctggaaggatggaagaaacgcctggagaatatttgggatgagacaccactgtattttgctccaagcagcctctttgacctaaacttccaggcaggattcttaatgaaaaaagaggtacaggatgaggagaaaaacaagaaatttggcctttctgtgggccatcacttgggcaagtccatcccaactgacaaccagatcaaagctagaaaatgagattccttagcctggatttccttctaacatgttatcaaatctgggtatctttccaggcttccctgacttgctttagtttttaagatttgtgtttttctttttccacaaggaataaatgagagggaatcgaksaaaaaaaaaaaa

SEQ ID NO: 48 - DNA, 430 bp, Homo sapien
cctatattcagccacagcctctgggagtggtgctgataatcggagcttggaattaccccttcgttctcaccattcagccactgataggagccatcgctgcaggaaatgctgtgattataaagccttctgaactgagtgaaaatacagccaagatcttggcaaagcttctccctcagtatttagaccaggatctctatattgttattaatggtggtgttgaggaaaccacggagctcctgaagcagcgatttgaccacattttctatacgggaaacactgcggttggcaaaattgtcatggaagctgctgccaagcatctgacccctgtgactcttgaactgggagggaaaagtccatgttatattgataaagattgtgacctggacattgtttgcagacgcataacctggggaaaatacatgaattgtgg

SEQ ID NO: 49 - DNA, 288 bp, Homo sapien
ccatccgaagcaagattkcagatggcagtgtgaagagagaagacatattctacacttcaaagctttggwgcaattcccatcgaccagagttggtccgaccagccttggaaaggtcactgaaaaatcttcaattggattatgttgacctctaccttattcattttccagtgtctgtaaagccaggtgaggaagtgatcccaaaagatgaaaatggaaaaatactatttgacacagtggatctctgtgccacgtgggaggccrtggagaagtgtaaagatgcaggattgg

SEQ ID NO: 50 - DNA, 411 bp, Homo sapien
ccagagaatgacattcatgtccccgtggatcccttgcagagagtacatggagccactgccaccagtggtgatggaaagcactgtcttcttactccggaagggtcctttgtcatacatggcagcgtaagtgtaagcaaactctcctatgaacactcgctcaaaccagcctttcagaatggcagggactccaaaccactgcagggggaactggaatatcacaaggtctgcggcttccagcttcttttgttcagccacaatatctgggctcagatggccttctttataagccagaacagactcggcaggatactgaaagttcgcagggtccttcagtttacctgtgatgtcctttctggaaatgatgggattgaagttcatggcatagaggtccgactccaccacctcccatcc

SEQ ID NO: 51 - DNA, 503 bp, Homo sapien
gatatcttatgattaaaaacaaattaaattttaaaacacctgaagatatattagaagaaattgtgcaccctccacaaaacatacaaagtttaaaagtttggatctttttctcagcaggtatcagttgtaaataatgaattaggggccaaaatgcaaaacgaaaaatgaagcagctacatgtagttagtaatttctagtttgaactgtaattgaatattgtggcttcatatgtattattttatattgtacttttttcattattgatggtttggactttaataagagaaattccatagtttttaatatcccagaagtgagacaatttgaacagtgtattctagaaaacaatacactaactgaacagaagtgaatgcttatatatattatgatagccttaaacctttttcctctaatgccttaactgtcaaataattataaccttttaaagcataggactatagtcagcatgctagactgagaggtaaacactgatgcaattaaga

SEQ ID NO: 52 - DNA, 503 bp, Homo sapien; identical to SEQ ID NO: 51

SEQ ID NO: 53 - DNA, 531 bp, Homo sapien
tttttttttttttttaaaatgaggatattttattatttcaggtaattttcccagaggkgagaatagtacatgggaaattctctttaggccaggtctagtattacagkgtggkgctcaaggccgcccatcagaacagtgatactctcccaacagatttcatccaccccgtctccactaacttttgccataaaaattcctctgaattgtatcttcttggaagaagtaaatatctgttcgactatacaaagaaacagagaaaccactcccattgcaatcaatcttcaagagagggagcaggcaagccgtgttctttctgctgagttttatagactctgacaagctgtgaaataaacataaacagaagacaaaacagtgccacaaataagcagtagatgaccctgtgacaagacggcattgcagaacaaagactgacgtttaaaggggagtcatgcagagtaacatgggaacacaagcctgacaacctggtcagcttccacttactctagctcctttgaactctcaacactaaaa

SEQ ID NO: 54 - DNA, 450 bp, Homo sapien
ccatgggtgtctggagcwccctgaaactgtatcaaagttgtacatatttccaaacatttttaaaatgaaaaggcactctcgtgttctcctcactctgtgcactttgctgttggtgtgacaaggcatttaaagatgtttctggcattttctttttatttgtaaggtggtggtaactatggttattggctagaaatcctgagttttcaactgtatatatctatagtttgtaaaaagaacaaaacaaccgagacaaacccttgatgctccttgctcggcgttgaggctgtggggaagatgccttttgggagaggctgtagctcagggcgtgcactgtgaggctggacctgttgactctgcagggggcatccatttagcttcaggttgtcttgtttctgtatatagtgacatagcattctgctgccatcttagctgtggacaaaggggggtcag

SEQ ID NO: 55 - DNA, 648 bp, Homo sapien
caacttcaaccacaggctgctggasatgatcctcarcaagccagggctcaagtacaagcctgtctgcaaccaggtggaatgtcatccttacttcaaccagagaaaactgctggatttctgcaagtcaaaagacattgttctggttgcctatagtgctctgggatcccaccgagaagaaccatgggtggacccgaactccccggtgctcttggaggacccagtcctttgtgccttggcaaaaaagcacaagcgaaccccagccctgattgccctgcgctaccagctrcagcgtggggttgtggtcctggccaagagctacaatgagcagcgcatcagacagaacgtgcaggtgtttgaattccagttgacttcagaggagatgaaagccatagatggcctaaacagaaatgtgcgatatttgacccttgatatttttgctggcccccctaattatccattttctgatgaatattaacatggagggcattgcatgaggtctgccagaaggccctgcgtgtggatggtgacacagaggatggctctatgctggtgactggacacatcgcctctggttaaatctctcctgcttggygayttcagcaagctacagcaaagcccattggccggaaaaaatatcaagggtcaaat

SEQ ID NO: 56 - DNA, 536 bp, Homo sapien
ctggcatgagaatatttttttttttaagtgcggtagtttttaaactgtttgtttttaaacaaactatagaactcttcattgtcagcaaagcaaagagtcactgcatcaatgaaagttcaagaacctcctgtacttaaacacgattcgcaacgttctgttattttttttgtatgtttagaatgctgaaatgtttttgaagttaaataaacagtattacatttttaaaactcttctctattataacagtcaatttctgactcacagcagtgaacaaacccccactccattgtatttggagactggcctccctataaatgtggtagcttcttttattactcagtggacctgcccgggcggccgctcgaagccgaattccagcacactggcggccgttactagtggatccgagctcggtaccaagcttggccgtaatcatggtcatagctgtttcctgtgtgaaattgttatccgctcacaattccacacaacatacgagccggaagcataaagtgtaaagcctggggtgcctaatgagt

SEQ ID NO: 57 - DNA, 391 bp, Homo sapien
aggaactactgtcccagagctgaggcaaggggatttctcaggtcatttggagaacaagtgctttagtagtagtttaaagtagtaactgctactgtatttagtggggtggaattcagaagaaatttgaagaccagatcatgggtggtctgcatgtgaatgaacaggaatgagccggacagcctggctgtcattgctttcttcctccccatttggacccttctctgcccttacatttttgtttctccatctaccaccatccaccagtctatttatttgtctagttggatttcatttcttctggaaaatttattgtttattggcatgtgacccttgactgatggcttcattagcattytgtttttctttttggatccttaatagaaaactcaat

SEQ ID NO: 58 - DNA, 455 bp, Homo sapien
gaagacatgcttacttccccttcaccttccttcatgatgtgggaagagtgctgcaacccagccctagccaacgccgcatgagagggagtgtgccgagggcttctgagaaggtttctctcacatctagaaagaagcgcttaagatgtggcagcccctcttcttcaagtggctcttgtcctgttgccctgggagttctcaaattgctgcagcagcctccacccagcctgaggatgacatcaatacacagaggaagaagagtcaggaaaagatgagagaagttacagactctcctgggcgaccccgagagcttaccattcctcagacttcttcacatggtgctaacagatttgttcctaaaagtaaagctctagaggccgtcaaattggcaatagaagccgggttccaccatattgattctgcacatgtttacaataatgaggagcaggttggactgg

SEQ ID NO: 59 - DNA, 398 bp, Homo sapien
  misc_feature (1)...(398): n = A,T,C or G
ctcagaggcagcgtgcgggtgtgctctttgtgaaattccaccatggcgtaccgtggccagggtcagaaagtgcagaaggttatggtgcagcccatcaacctcatcttcagatacttacaaaatagatcgcggattcaggtgtggctctatgagcaagtgaatatgcggatagaaggctgtatcattggttttgatgagtatatgaaccttgtattagatgatgcagaagagattcattctaaaacaaagtcaagaaaacaactngntcggatcatgctaaaaggagataatattactctgctacaaagtgtctccaactagaaatgatcaatgaagtgagaaattgttgagaaggatacagtttgtttttagatgtcctttgtccaatgtgaacattt

SEQ ID NO: 60 - DNA, 532 bp, Homo sapien
gacttctgagacctggggcacccgggcctttgcggcagctactggcagggcctggccacctcataggactcagttcccttctgaacactcgggggacatgggcctctaactgcccactctgatatgcctgggtgagcctaggagggaaggctctgatttggatttctccagtcaaagctcacagaaaaaaacctggcactttgattttcatgggatggtcctaacagggtcagtcacctccgagcagtttgggaacccagtttcttgtcctgggccctcaggtcagcctggctgaattaggacccttccttggcacaggggtgagaaagagcttggggaacgcttggcattatggagggctggaaggggctcaaccccgatttggagagaagtttgggatggagtgggcgagagattgagagagcgagcaggaaaagaggtcttggagcctgggactgatggtggataaggcctggaaagaasatgacsaggaggaggagagagggaagtgggtggatgaggagcaggctga

SEQ ID NO: 61 - DNA, 466 bp, Homo sapien
gcgacggcgacgtctcttttgactaaaagacagtgtccagtgctccagcctaggagtctacggggaccgcctcccgcgccgccaccatgcccaacttctctggcaactggaaaatcatccgatcggaaaacttcgaggaattgctcaaagtgctgggggtgaatgtgatgctgaggaagattgctgtggctgcagcgtccaagccagcagtggagatcaaacaggagggagacactttctacatcaaaacctccaccaccgtgcgcaccacagagattaacttcaaggttggggaggagtttgaggagcagactgtggatgggaggccctgtaagagcctggtgaaatgggagagtgagaataaaatggtctgtgagcagaagctcctgaagggagagggccccaagacctcgtggaccagagaactgaccaacgatggggaactgatcctgaccatgacggcgga

SEQ ID NO: 62 - DNA, 548 bp, Homo sapien
ttttgaatttacaccaagaacttctcaataaaagaaaatcatgaatgctccacaatttcaacataccacaagagaagttaatttcttaacattgtgttctatgattatttgtaagaccttcaccaagttctgatatcttttaaagacatagttcaaaattgcttttgaaaatctgtattcttgaaaatatccttgttgtgtattaggtttttaaataccagctaaaggattacctcactgagtcatcagtaccctcctattcagctccccaagatgatgtgtttttgcttaccctaagagaggttttcttcttatttttagataattcaagtgcttagataaattatgttttctttaagtgtttatggtaaactcttttaaagaaaatttaatatgttatagctgaatctttttggtaactttaaatctttatcatagactctgtacatatgttcaaattagctgcttgcctgatgtgtgtatcatcggtgggatgacagaacaaacatatttatgatcatgaataatgtgctttgtaaaaagatttc

SEQ ID NO: 63 - DNA, 547 bp, Homo sapien
tttccaaagcggagacttccgacttccttacaggatgaggctgggcattgcctgggacagcctatgtaaggccatgtgccccttgccctaacaactcactgcagtgctcttcatagacacatcttgcagcatttttcttaaggctatgcttcagtttttctttgtaagccatcacaagccatagtggtaggtttgccctttggtacagaaggtgagttaaagctggtggaaaaggcttattgcattgcattcagagtaacctgtgtgcatactctagaagagtagggaaaataatgcttgttacaattcgacctaatatgtgcattgtaaaataaatgccatatttcaaacaaaacacgtaatttttttacagtatgttttattaccttttgatatctgttgttgcaatgttagtgatgttttaaaatgtgatcgaaaatataatgcttctaagaaggaacagtagtggaatgaatgtctaaaagatctttatgtgtttatggtctgcagaaggatttttgtgatgaaaggggattttttgaaaaat

SEQ ID NO: 64 - DNA, 528 bp, Homo sapien
  misc_feature (1)...(528): n = A,T,C or G
cacctmctcccsccwggcgcttwctcsgacgccttgcccascgggccgcccgaccccctgsrccatggaccccgctcgcccsctggggmtgtygatkctgctgcttttcctgrckgaggctgcactgggcgatgctgatcargagccaacaggaaataacrcggagatctgkctcctgcccctagactackgaccctgcckggccctacttytccgytactactacgacaggyacacgcagagctgccgccwgttcctgkrckggggctgcrasggcaacrccaacwattyctacacckgkgaggmttrcgackatgctwgstggargatagaaaaagttcccaaastttgccggctgmaagtgaatgaggacnaccagggtgaggggtacacagataagtatttctttaatctaakkwccatgacatgwgaaaaattctttnncggtgggngtcaccggaccggattgagaacangtttgcagatgangctactgggatgggctcctgcrcacnaaagaaantatca

SEQ ID NO: 65 - DNA, 547 bp, Homo sapien
  misc_feature (1)...(547): n = A,T,C or G
kgaatgaasaacgaacgctggaagtagaaatagagcctggggtgagagacggcatggagtacccctttattggagaaggtgagcctcacgtggatggggagcctggagatttacggttccgaatcaaagttgtcaagcacccaatatttgaaaggagaggagatgatttgtacacaaatgtgacagtctcattagttgagtcactggttggctttgagatggatattactcacttggatggtcacaaggtacatatttcccgggataagatcaccaggccaggagcgaagctatggaagaaaggggaagggctccccaactttgacaacaacaatatcaagggctctttgataatcacttttgatgtggattttccaaaagaacagttaacagaggaagcgagagaangtatcaaacagctactgaaacaagggtcagtgcagaaggtatacaatggactgcaaggatattgagagtgaataaaattggactttgtttaaaataaagtgaataagcgatatttattatctgcaaggttttttttgtg

SEQ ID NO: 66 - DNA, 535 bp, Homo sapien
ggggaggtctacgcttctagagcttgagccagcggggcgaccctgcagtggcaggactcggcaccgcgccctccaccgccggttggtggcctgcgtgacagtttcctcccgtcgacatcgaaaggaagccggacgtgggcgggcagagagcttcatcgcagtaggaatggcagccccatctatgaaggaaagacaggtctgctggggggcccgggatgagtactggaagtgtttagatgagaacttagaggatgcttctcaatgcaagaagttaagaagctctttcgaatcaagttgtccccaacagtggataaaatattttgataaaagaagagactacttaaaattcaaagaaaaatttgaagcaggacaatttgagccttcagaaacaactgcaaaatcctaggctgttcataaagattgaaagtattctttctggacattgaaaaagctccactgactatggaacagtaatagtttgaatcatagtgaacatcaatacttgttccctatatacgacacttgataattaaga

SEQ ID NO: 67 - DNA, 527 bp, Homo sapien
atttctgccacttaattcaaacagtcatatgcaggtcgcttaatttatttgtgcttttgtttcatcttctacaaggccctcttagctctaaaacttgacagtggaataaggaaatgtttttccaaatctgcattgccggtgagatcctcaacatcagcatgttgagatggacctcaaccccacctctaaccctgaaacacactactcgatattatcttaggtatgttttagggtttagtttgtaaaataataatttatttttgaaggaaatataaaatattaaagagtaataatagctatcattttttaagattcaatctaaaacaatggactctttttttttccatttgtgatgtagataagcaagacaattttgatcatgagtggtgaaaagaggatcaaacttgactattcttgcaatggcagtccagcaacaagcctttcatttacattaaattataacttttcattcattcctaaaccaaacttaaaattctgctttcctttgagtagaaggtatttaactt

SEQ ID NO: 68 - DNA, 431 bp, Homo sapien
gggaaacttcatgggtttcctcatctgtcatgtcgatgattatatatggatacatttacaaaaataaaaagcgggaattttcccttcgcttgaatattatccctgtatattgcatgaatgagagatttcccatatttccatcagagtaataaatatacttgctttaattcttaagcataagtaaacatgatataaaaatatatgctgaattacttgtgaagaatgcatttaaagctattttaaatgtgtttttatttgtaagacattacttattaagaaattggttattatgcttactgttctaatctggtggtaaaggtattcttaagaatttgcaggtactacagattttcaaaactgaatgagagaaaattgtataaccatcctgctgwtcctttagtgcaatacaataaaactctgaaattaaaact

SEQ ID NO: 69 - DNA, 399 bp, Homo sapien
gacacggcggacacacacaaacacagaaccacacagccagtcccaggagcccagtaatggagagccccaaaaagaagaaccagcagctgaaagtcgggatcctacacctgggcagcagacagaagaagatcaggatacagctgagatcccagtgcgcgacatggaaggtgatctgcaagagctgcatcagtcaaacaccggggataaatctggatttgggttccggcgtcaaggtgaagataatacctaaagaggaacactgtaaaatgccagaagcaggtgaagagcaaccacaagtttaaatgaagacaagctgaaacaacgcaagctggttttatattagatatttgacttaaactatctcaataaagttttgcagctttcaccaaraaaaaaaaa

SEQ ID NO: 70 - DNA, 479 bp, Homo sapien
cgcggcggagctgtgagccggcgactcgggtccctgaggtctggattctttctccgctactgagacacggcggacacacacaaacacagaaccacacagccagtcccaggagcccagtaatggagagccccaaaaagaagaaccagcagctgaaagtcgggatcctacacctgggcagcagacagaagaagatcaggatacagctgagatcccaggtgctgggaagggaaatgcgcgacatggaaggtgatctgcaagagctgcatcagtcaaacaccggggataaatctggatttgggttccggcgtcaaggtgaagataatacctaaagaggaacactgtaaaatgccagaagcaggtgaagagcaaccacaagtttaaatgaagacaagctgaaacaacgcaagctggttttatattaggatatttgacttaaactatctcaataaagttttgcagctttcaccaaaaaaaaaaaa

SEQ ID NO: 71 - DNA, 437 bp, Homo sapien
ctcagcggctgccaacagatcatgagccatcagctcctctggggccagctataggacaacagaactctcaccaaaggaccagacacagtgrgcaccatgggacagtgtcggtcagccaacgcagaggatgctcaggaattcagtgatgtggagagggccattgagaccctcatcaagaactttcaccagtactccgtggagggtgggaaggagacgctgaccccttctgagctacgggacctggtcacccagcagctgccccatctcatgccgagcaactgtggcctggaagagaaaattgccaacctgggcagctgcaatgactctaaactggagttcaggagtttctgggagctgattggagaagcggccaagagtgtgaagctggagaggcctgtccgggggcactgagaactccctctggaattcttgggggg

SEQ ID NO: 72 - DNA, 561 bp, Homo sapien
ggatggtatactgtaaattcagcatatggagataccattatcataccttgccgacttgacgtacctcagaatctcatgtttggcaaatggaaatatgaaaagcccgatggctccccagtatttattgccttcagatcctctacaaagaaaagtgtgcagtacgacgatgtaccagaatacaaagacagattgaacctctcagaaaactacactttgtctatcagtaatgcaaggatcagtgatgaaaagagatttgtgtgcatgctagtaactgaggacaacgtgtttgaggcacctacaatagtcaaggtgttcaagcaaccatctaaacctgaaattgtaagcaaagcactgtttctcgaaacagagcagctaaaaaagttgggtgactgcatttcagaagacagttatccagatggcaatatcacatggtacaggaatggaaaagtgctacatccccttgaaggagcggtggtcataatttttaaaaaggaaatggacccagtgactcagctctataccatgacttccaccctggagtacaagacaaccaaggctgac

SEQ ID NO: 73 - DNA, 916 bp, Homo sapien
ggagaaaataaggtggagtcctacttgtttaaaaaatatgtatctaagaatgttctagggcactctgggaacctataaaggcaggtatttcgggccctcctcttcaggaatcttcctgaagacatggcccagtcgaaggcccaggatggcttttgctgcggccccgtggggtaggagggacagagagacagggagagtcagcctccacattcagaggcatcacaagtaatggcacaattcttcggatgactgcagaaaatagtgttttgtagttcaacaactcaagacgaagcttatttctgaggataagctctttaaaggcaaagctttattttcatctctcatcttttgtcctccttagcacaatgtaaaaaagaatagtaatatcagaacaggaaggaggaatggcttgctggggagcccatccaggacactgggagcacatagagattcacccatgtttgttgaacttagagtcattctcatgcttttctttataattcacacatatatgcagagaagatatgttcttgttaacattgtatacaacatagccccaaatatagtaagatctatactagataatcctagatgaaatgttagagatgctatatgatacaactgtggccatgactgaggaaaggagctcacgcccagagactgggctgctctcccggaggccaaacccaagaaggtctggcaaagtcaggctcagggagactctgccctgctgcagacctcggtgtggacacacgctgcatagagctctccttgaaaacagaggggtctcaagacattctgcctacctattagcttttctttatttttttaactttttggggggaaaagtatttttgagaagtttgtcttgcaatgtatttataaatagtaaataaagtttttaccattaaaaaaa

SEQ ID NO: 74 - DNA, 547 bp, Homo sapien
agtggcattaacttttagaatttgggctggtgagattaattttttttaatatcccagctagagatatggcctttaactgacctaaagaggtgtgttgtgatttaattttttcccgttcctttttcttcagtaaacccaacaatagtctaaccttaaaaattgagttgatgtccttataggtcactacccctaaataaacctgaagcaggtgttttctcttggacatactaaaaaatacctaaaaggaagcttagatgggctgtgacacaaaaaattcaattactgtcatctaatgccagctgttaaaagtgtggccactgagcatttgattttataggaaaaaatagtatttttgagaataacatagctgtgctattgcacatctgttggaggacatcccagatttgcttatactcagtgcctgtgatattgagtttaaggatttgaggcaggggtaattattaaacatattgcttctattcttggaaaaatagaagkgtaaaatgttaataatacaaatgtcactgtgacctcctccactgagagg

SEQ ID NO: 75 - DNA, 793 bp, Homo sapien
tgaggaagttgcaagccaacaaaaaagttcaaggatctagaagacgattaagggaaggtcgttctcagtgaaaatccaaaaaccagaaaaaaatgtttatacaaccctaagtcaataacctgaccttagaaaattgtgagagccaagttgacttcaggaactgaaacatcagcacaaagaagcaatcatcaaataattctgaacacaaatttaatatttttttttctgaatgagaaacatgagggaaattgtggagttagcctcctgtggagttagcctcctgtggtaaaggaattgaagaaaatataacaccttacaccctttttcatcttgacattaaaagttctggctaactttggaatccattagagaaaaatccttgtcaccagattcattacaattcaaatcgaagagttgtgaactgttatcccattgaaaagaccgagccttgtatgtatgttatggatacataaaatgcacgcaagccattatctctccatgggaagctaagttataaaaataggtgcttggtgtacaaaactttttatatcaaaaggctttgcacatttctatatgagtgggtttactggtaaattatgttattttttacaactaattttgtactctcagaatgtttgtcatatgcttcttgcaatgcatattttttaatctcaaacgtttcaataaaaccatttttcagatataaagagaattacttcarattgagtaattcagaaaaactcaagatttaagttaaaaagtggtttggacttgggaacaggactttatacct

SEQ ID NO: 76 - DNA, 461 bp, Homo sapien
accttgcactattcccctcagtccatctatcgaggtctttgcaggaagcatactgggaattgaaacgagagcctaaatgacatctaagaaaggcagtgttcaataccaggtattaggtgaggatgggattctaaggacatcagtgggaggcagggagccaccttcagacctcagcatggaagcttccaagatccagaggaagaggcaacagcactgagagtcataggtagaagaatcatcacagccctgctaaccaggcagctgatgcccctctcccctggctccctgtgtccaaatcctacaggggcatctgttggctgaactcaacctgaagccaaagagaagatgagtggagagaggcaacatttatagagctcaggtttctagggctggagagggatctggagggacacacaggagacacctggcataaccaaaaaatgattaaaaaaaaaaaaaaa

SEQ ID NO: 77 - DNA, 642 bp, Homo sapien
ggttgcacgaaacacactggggaatggagcaaaacagtctttgaatatcgaacacgcaaggctgtgagactacctattgtagatattgcaccctatgacattggtggtcctgatcaagaatttggtgtggacgttggccctgtttgctttttataaaccaaactctatctgaaatcccaacaaaaaaaatttaactccatatgtgttcctcttgttctaatcttgtcaaccagtgcaagtgaccgacaaaattccagttatttatttccaaaatgtttggaaacagtataatttgacaaagaaaaatgatacttctctttttttgctgttccaccaaatacaattcaaatgctttttgttttatttttttaccaattccaatttcaaaatgtctcaatggtgctataataaataaacttcaacactctttatgataacaaaaaaaarawawattctttgaatcctagcccatctgcagagcaatgactgtgctcaccagtaaaagataacctttctttctgaaatagtcaaatacgaaattagaaaagccctccctattttaactacctcaactggtcagaaacacagattgtattctatgagtcccagaagatgaaaaaaattttatacgttgataaaact

SEQ ID NO: 78 - DNA, 519 bp, Homo sapien
gcagaagaagaagcggaccttccgcaagttcacctaccgcggcgtggacctcgaccagctgctggacatgtcctacgagcagctgatgcagctgtacagtgcgcgccagcggcggcggctgaaccggggcctgcggcggaagcagcactccctgctgaagcgcctgcgcaaggccaagaaggaggcgccgcccatggagaagccggaagtggtgaagacgcacctgcgggacatgatcatcctacccgagatggtgggcagcatggtgggcgtctacaacggcaagaccttcaaccaggtggagatcaagcccgagatgatcggccactacctgggcgagttctccatcacctacaagcccgtaaagcatggccggcccggcatcggggccacccactcctcccgcttcatccctctcaagtaatggctcagctaataaaaggcgcacatgactccaaaaaaaaaaaaaaaagggcggccgccaccgcgggggagctccacttttgttccctttaatga

SEQ ID NO: 79 - DNA, 526 bp, Homo sapien
gtctggaggcggtgtcctctccgccctgtcgggtcctggatgagtacgagttatggtcacggtcacagcctgatctcttatgtgttcatagccattcgctctcccatcagaactgtttgtcctgaatgtgttcctctagttctagaaaatgaccactaatttaaaaaactcggttgtgaggtttgcccagaggcacttgttccagaatttcccctcctgcttcagccatgtccttgtcacttggcattctaagctaaagctttagcttcccaattcgtgatgtgctaggccaagattcgggagctgttgccagcctcgtcaaatatggaagagaaacaacctgcggtcaaaagggagtgatttgttaagtggtgcgcgtctatctcataactagatgtaccaaccagggaagggccaaggatggaaaggggtaacttttgtgcttccaaagtagctaagcagaagtgggggagcagtttagccagatgatctttgattaggcaaacattgagttttaaagaggctg

SEQ ID NO: 80 - DNA, 281 bp, Homo sapien
gttatattagtgggtagtgtaacattttatccaggttggggtgaggggagatggccacagtagcaagtggtgacactaaataccattttgaaggctgatgtgtatatacatcattactgtccgtagcaatgaaggatacagtactgtgttgtgggtgagtgttgctattgcccagcattaatatttgggtgtgtatgtttgaggctatgaaacacgcaggagtgtttttgtgctattaattttaagagaaagcagctttttcttaaaattcactgttgaga

SEQ ID NO: 81 - DNA, 405 bp, Homo sapien
  misc_feature (1)...(405): n = A,T,C or G
gtgggtgggagcgcgtgctgttgggagttgcttggaggttggcggcgcggggctgaaggctagcaaaccgagcgatcatgtcgcacaaacaaatttactattcggacaaatacgacsacgaggagtttgastatcgacatgtcatgctgcccaaggacatakccaasctggtccctaaaacccatctgatgtctgaatctgaatggaggaatcttggcngttcagmagantcagggatgggtccattatatgatccatganccagaacctcdcatcttgctgttccggcgscccacttaccccaanaaaccaamgaaatgaaccttggctactacttttcaatcctcaaakcttttcacavhtgaccttccttcctaacattctttmtgataaacatttattaag

SEQ ID NO: 82 - DNA, 547 bp, Homo sapien
tagtttttaagaagaaattttttttggcctatgaaattgttaaacctggaacatgacattgttaatcatataataatgattcttaaatgctgtatggtttattatttaaatgggtaaagccatttacataatatagaaagatatgcatatatctagaaggtatgtggcatttatttggataaaattctcaattcagagaaatcatctgatgtttctatagtcactttgccagctcaaaagaaaacaataccctatgtagttgtggaagtttatgctaatattgtgtaactgatattaaacctaaatgttctgcctaccctgttggtataaagatattttgagcagactgtaaacaagaaaaaaaaaatcatgcattcttagcaaaattgcctagtatgttaatttgctcaaaatacaatgtttgattttatgcactttgtcgctattaacatcctttttttcatgtagatttcaataattgagtaattttagaagcattattttaggaatatatagtkgtcacagtaaatatcttgttttttctatg

SEQ ID NO: 83 - DNA, 529 bp, Homo sapien
ctattctaagagatgctcttagtgatcttgcattacactttctgaataaaatgaagatcatggtgattaaggatattgaaagagaagacattgaattcatttgtaagacaattggaaccaagccagttgctcatattgaccaatttactgctgacatgctgggttctgctgagttagctgaggaggtcaatttaaatggttctggcaaactgctcaagattacaggctgtgccagccctggaaaaacagttacaattgttgttcgtggttctaacaaactggtgattgaagaagctgagcgctccattcatgatgccctatgtgttattcgttgtttagtgaagaagagggctcttattgcaggaggtggtgctccagaaatagagttggccctacgattaactgaatattcacgaacactgagtggtatggaatcctactgcgttcgtgcttttgcagatgctatggaggtcattccatctacactagctgaaaatgcccggcctgaatcccatttctacagtaacag

SEQ ID NO: 84 - DNA, 527 bp, Homo sapien
cccatcaccagaatcccttcatgggagggatggatgcctgttgaaactcactgacctattggactgacgctggggtggtatcttcatcagagctattgtaagtcatccaaaaggcttctgacgaaagaacaatttttaaaaagtccctcttttcaatcaagccaatgtcctattttatttctaaaagttttgggactcgtgctgttatcaagtacaatgaaaatggctttataaatagctgttttgacattgtgatagaaggcttgaatacggaggaaagatgtcgctggagctagtcctgagttccgactgtccctgtggtgggaatccagtctgggaaagcaggactgttttagcaaacgtgtactcgttctataaaaatggaatctgttctgcaggttaccgtccctccccgcccaagcatcccctctgtcctgtctctctgctgctgggacccagggctttttcagctgcagaacccactggacttccaggaatcaaggaaaaagtggaaatgtccaactgtg

SEQ ID NO: 85 - DNA, 401 bp, Homo sapien
cagtgtggtggaattcccaagatagaaatgaaaaactcttttatagagtgctgacatctgacattgagaaattcatgcctattgtttatactcccactgtgggtctggcttgccaacaatatagtttggtgtttcggaagccaagaggtctctttattactatccacgatcgagggcatattgcttcagttctcaatgcatggccagaagatgtcatcaaggccattgtggtgactgatggagagcgtattcttggcttgggagaccttggctgtaatggaatgggcatccctgtgggtaaattggctctatatacagcttgcggagggatgaatcctcaagaatgtctgcctgtcattctggatgtgggaaccgaaaatgaggagttacttaaagatcca

SEQ ID NO: 86 - DNA, 547 bp, Homo sapien
gaagcctcttgtgtttgtgtgcagagaagtatatgatccaccatgctaatgacacttgcctttttttccaccattaaggctttaagaacatgtggaataagttttttagctgctaatgacaaaacaaatcctgtaactacccagccagcaagtatatagcacagaacactgtgttactttacaagggcttatgtgactggaataaggtggtcccacttgactgttccaaagagcagcttctcagatcttcagtgttcactggtaaatttctaacagtgtatttgtgtaaagtttgtcatttcatactccatacactacagttgctgtcactgatccctgttttgctggcttttaagctacttggtcaaaaatcctgcttccttaaaacatagagaattaatgagcatctcaagctttttcttttcctttttaatgatgcctgcactatcaagagtattctagtgttctctctttgtttggcatataatcatgcaccaaactttttatttctttaaggtgggagtatatttttatttcctaaatgcca

SEQ ID NO: 87 - DNA, 530 bp, Homo sapien
atggattcgaaataccagkgtgtgaagctgaatgatggtcacttcatgcctgtcctgggatttggcacctatgcgcctgcagaggttcctaaaagtaaagctctagaggccgtcaaattggcaatagaagccgggttccaccatattgattctgcacatgtttacaataatgaggagcaggttggactggccatccgaagcaagattgcagatggcagtgtgaagagagaagacatattctacacttcaaagctttggagcaattcccatcgaccagagttggtccgaccagccttggaaaggtcactgaaaaatcttcaattggactatgttgacctctatcttattcattttccagtgtctgtaaagccaggtgaggaagtgatcccaaaagatgaaaatggaaaaatactatttgacacagtggatctctgtgccacrtgggaggccatggagaagtgtaaagatgcaggattggccaagtccatcggggtgtccaacttcaaccacaggctgctggagatgatcct

SEQ ID NO: 88 - DNA, 529 bp, Homo sapien
acctgagctaagaaggataattgtcttttggtaactaggtctacaggtttacatttttctgtgttacactcaaggataaaggcaaaatcaattttgtaatttgtttagaagccagagtttatcttttctataagtttacagcctttttcttatatatacagttattgccacctttgtgaacatggcaagggacttttttacaatttttattttattttctagtaccagcctaggaattcggttagtactcatttgtattcactgtcactttttctcatgttctaattataaatgaccaaaatcaagattgctcaaaagggtaaatgatagccacagtattgctccctaaaatatgcataaagtagaaattcactgccttcccctcctgtccatgaccttgggcacagggaagttctggtgtcatagatatcccgttttgtgaggtagagctgtgcattaaacttgcacatgactggaacgaagtatgagtgcaactcaaatgtgttgaagatactgcagtcatttttgt

SEQ ID NO: 89 - DNA, 547 bp, Homo sapien
gtttatatatatagcgaataaatctagttgtataaatttttaaatgccgtcagtagaaagcacacaaggttatgatttttttaattactggcttctgatttctttcacttctgatccttttcctttttctcagatgtagctgagtcttgatcattttaagacaacgatgggtagaattttgagattaatgttaattttccctttttgttaatttcagtcccctctcactatgcttttgtccagaaggatcaagaattctaccatcccttgggtctttgtgtataaacaatgttaaataaaggtagactcagtctttaagatattagacagtttttttagtccatgggattgtaaatataaacattaactttcctataagaatattttggctttgtaatctatagcctcaaattggtatttattatggattcactagacaaacagctgtttccttattgtcttttttctttagtgtttctgatttgctatcagtagctgtttttaaagccatccaaggaaaataattatttacagtttttgaagtcac

SEQ ID NO: 90 - DNA, 528 bp, Homo sapien
gagcagcagaagctgtacagcaagatgatcgtggggaaccacaaggacaggagccgctcctgagcctgcctccagctggctggggccaccgtgcggggtgccaacgggctcagagctggagttgccgccgccgcccccactgctgtgtcctttccagactccagggctccccgggctgctctggatcccaggactccggctttcgccgagccgcagcgggatccctgtgcacccggcgcagcctacccttggtggtctaaacggatgctgctgggtgttgcgacccaggacgagatgccttgtttcttttacaataagttgttggaggaatgccattaaagtgaactccccacctttgcacgctgtgcgggctgagtggttggggagatgtggccatggtcttgtgctagagatggcggtacaagagtctgttatgcaagcccgtgtgccagggatgtgctgggggcggccacccgctctccaggaaaggcacagctgaggcactgtggctggcttcggcctcaacat

SEQ ID NO: 91 - DNA, 547 bp, Homo sapien
atataccatttaatacatttacactttcttatttaagaagatattgaatgcaaaataattgacatatagaactttacaaacatatgtccaaggactctaaattgagactcttccacatgtacaatctcatcatcctgaagcctataatgaagaaaaagatctagaaactgagttgtggagctgactctaatcaaatgtgatgattggaattaraccmtttggscyttgraccttymtwrgraaaawgrmccmacctttyttaacmtgraccwccytmatctctagaagctgggatggacttactatyctkgttwatattttaaatackgaaaggtgctatgcttctgttattattccaagactggagataggcagggctaaaaaggtattattatttttcctttaatgatggtgctaaaattcttcctataaaattccttaaaaataaagatggtttaatcactaccattgtgaaaacataactgttagacttcccgtttctgaaagaaagagcatcgttccaatgcttgttcactgttcctctgtc

SEQ ID NO: 92 - DNA, 527 bp, Homo sapien
  misc_feature (1)...(527): n = A,T,C or G
gctggctagtaggggaacatgtagtagccaagcccatgcattgcagtgcacagagcaacattggggtaacaggatgggtacctgtcacggcctgtgcaaacataacatgtgtcaccacactgaaggtatggtggaacaagtggcctcaccaaggtcggaccccaatggactttttgcctcttgggagcttatgggtctatgaggacacagtagcctttcctatcagcaaactggagtggatgttgtatctgggggtggccttatgtacctgctactgttctccccacattgcccagatgcctgtataactgggaggcactgkgctctcagtttttgcgaatgtgatgagccccctggtgtttctacccttttggcaatgactatccctggagncatgtgtcaaaactgtaaagcacaatttactgctctttgcggagcacaccgctcatgctctgaattacacctgaktgtccctcctccwgktawtgaatgaggttgatcnvatcagaaadgtggkgttggcmata

SEQ ID NO: 93 - DNA, 531 bp, Homo sapien
ggtattcatacagccttcctaaaggcaatgctttccacaggatttaagataccccagaaaggcatcctgataggcatccagcaatcattccggccaagattccttggtgtggctgaacaattacacaatgaaggtttcaagctgtttgccacggaagccacatcagactggctcaacgccaacaatgtccctgccaccccagtggcatggccgtctcaagaaggacagaatcccagcctctcttccatcagaaaattgattagagatggcagcattgacctagtgattaaccttcccaacaacaacactaaatttgtccatgataattatgtgattcggaggacagctgttgatagtggaatccctctcctcactaattttcaggtgaccaaactttttgctgaagctgtgcagaaatctcgcaaggtggactccaagagtcttttccactacaggcagtacagtgctggaaaagcagcatagagatgcagacaccccagccccattattaaatcaacctgagccacatgt

SEQ ID NO: 94 - DNA, 547 bp, Homo sapien
  misc_feature (1)...(547): n = A,T,C or G
gttaaacatggtctgcgtgccttaagagagacgcttcctgcagaacaggacctgactacaaagaatgtttccattggaattgttggtaaagacttggagtttacaatctatgatgatgatgatgtgtctccattcctggaaggtcttgaagaaagaccacagagaaaggcacagcctgctcaacctgctgatgaacctgcagaaaaggctgatgaaccaatggaacattaagtgataagccagtctatatatgtattatcaaatatgtaagaatacaggcaccacatactgatgacaataatctatactttgaaccaaaagttgcagagtggtggaatgctatgttttaggaatcagtccagatgtgagttttttccaagcaacctcactgaaacctatataatggaatacatttttctttgaaagggtctgtataatcattttctagaaagtatgggtatctatactaatgtttttatatgaagaacataggtgtctttgtggttttaaagacaactgtgaaataaaattgtttcaccgcctggtn

SEQ ID NO: 95 - DNA, 1265 bp, Homo sapien
gtggtcaagcagtgatttttctgggactgcagaagttcctgctgtgcccaacctttattactaactgggaaagacccagggagactgggatgggctcatgattctacatacagaactcatccaagaaaggaggaaaagctgatttttgtgaacgtcgctacttgtgcctgaactaactctcaggcacattagtcagaaaatactacctatggttactcccccaggttcctaaaagtaaagctttagaggccaccaaattggcaattgaagctggcttccgccatattgattctgctcatttatacaataatgaggagcaggttggactggccatccgaagcaagattgcagatggcagtgtgaagagagaagacatattctacacttcaaagctttggtgcaattcccatcgaccagagttggtccgaccagccttggaaaggtcactgaaaaatcttcaattggattatgttgacctctaccttattcattttccagtgtctgtaaagccaggtgaggaagtgatcccaaaagatgaaaatggaaaaatactatttgacacagtggatctctgtgccacgtgggaggccgtggagaagtgtaaagatgcaggattggccaagtccatcggggtgtccaacttcaaccgcaggcagctggagatgatcctcaacaagccagggctcaagtacaagcctgtctgcaaccaggtggaatgtcatccttacttcaaccagagaaaactgctggatttctgcaagtcaaaagacattgttctggttgcctatagtgctctgggatcccaccgagaagaaccatgggtggacccgaactccccggtgctcttggaggacccagtcctttgtgccttggcaaaaaagcacaagcgaaccccagccctgattgccctgcgctaccagctrcagcgtggggttgtggtcctggccaagagctacaatgagcagcgcatcagacagaacgtgcaggtttttgagttccagttgactgcagaggacatgaaagccatagatggcctaaacagaaatgtgcgatatttgacccttgatatttttgctggcccccctaattatccattttctgatgaatattaacatggagggcattgcatgaggtctgccagaaggccctgcgtgtggatggtgacacagaggatggctctatgctggtgactggacacatcgcctctggttaaatctctcctgcttggtgatttcagcaagctacagcaaagcccattggccaga

SEQ ID NO: 96 - DNA, 568 bp, Homo sapien
ccagtgtggtggaattcggtttaattacaaaatttgatcacgatcatattgtagtctctcaaagtgctctagaaattgtcagtggtttacatgaagtggccatgggtgtctggagcaccctgaaactgtatcaaagttgtacatatttccaaacatttttaaaatgaaaaggcactctcgtgttctcctcactctgtgcactttgctgttggtgtgacaaggcatttaaagatgtttctggcattttctttttatttgtaaggtggtggtaactatggttattggctagaaatcctgagttttcaactgtatatatctatagtttgtaaaaagaacaaaacaaccgagacaaacccttgatgctccttgctcggcgttgaggctgtggggaagatgccttttgggagaggctgtagctcagggcgtgcactgtgaggctggacctgttgactctgcagggggcatccatttagcttcaggttgtcttgtttctgtatatagtgacatagcattctgctgccatcttagctgtggacaaaggggggtcagctggcatgagaatattttt

SEQ ID NO: 97 - DNA, 546 bp, Homo sapien
ttgtaccgtatctgtaggcatcctgtaaataattccaaggggaaaactaaacgaggacgtgggttgtatcctgccaggttgagtggggctcacacgctagggtgagatgtcagaaagcgcttgtattttaaacaaccaaaaagaattgtaagggtggcttgctgccaggcttgcactgccgttcctgggggtgtgcatcttcgggaaaggtggtggcggggcgtccactaggtttcctgtcccctgctgctccttccgtaagaaaatgaaatattctatgcctaatactcacacgcaacatttcttgtactttgtaagtcgtttgcgagaatgcagaccacctcactaaactgtaaacggtaaagagatttttacttttggtctccgtgagtcgcatctctactaaggtttacacaggaattccacctgaagacttgtgttaaagttctacagcgcgcactgttaactgaacgtctttttcttcagcctatacgcggatccttgttttgagctctcagaatcactcagacaacattttgtaactgc

SEQ ID NO: 98 - DNA, 547 bp, Homo sapien
tactgggtgccaagctatgtgccaggcactttacatgtattgatttaacacttaacagccactctatattattccctttttacagatgaggcaatttaagctcaaagcatttaagtagacaaccaacctagaatcacatagcaaatgacagaagccagaggcctcccaagtctctctaactccaaaccctatgcttactctactatatcacactaccttgcaataggacaaagggaatatgtggtaaactatgttcccagcatctaaaagccaggagtggttttcatttttctttaagaagatgatagtgtgatttgaaacatatctgaatttcagaagaggggacttttaaaaattgccactcataaggaaagaaagaactttttcacatatttttgaaagaaacgatggtgagaagatattcttgataatagagatatgctaacatttgctttgggtgttttgtaggttagatttttttggtgtgtactttataggcttgcatattgcttactttaaacagctgaagttctaagtaagagtgttc

SEQ ID NO: 99 - DNA, 122 bp, Homo sapien
cagcctttctgtcatcatctccacagcccacccatcccctgagcacactaaccacctcatgcaggccccacctgccaatagtaataaagcaatgtcacttttttaaaacaaaaaaaaaaaaa

SEQ ID NO: 100 - DNA, 449 bp, Homo sapien; identical to SEQ ID NO: 10

SEQ ID NO: 101 - DNA, 131 bp, Homo sapien
ccatgttctctcttgactacgcatatgtgagatttgcccctccgccccgctcgtgatagccatccagatcttttacctggccctgtcttggagaatctgttttcaatctccactgattgcccccttgctgg

SEQ ID NO: 102 - DNA, 199 bp, Homo sapien
ctgctgcgcctgatgctgggacagccccgctcccagatgtaaagaacgcgacttccacaaacctggattttttatgtacaaccctgaccgtgaccgtttgctatattcctttttctatgaaataatgtgaatgataataaaacagctttgacttgaaaaaaaaaaaaaaaaaaaaaaaaaaaaaaaaaaaaaaaaaaaa

SEQ ID NO: 103 - DNA, 321 bp, Homo sapien
ttttttaggtttttaaactttttatttgcatattaaaaaaattgtgcattccaataattaaaatcatttgaacaaaaaaaaatggcactctgattaaactgcattacagcctgcaggacaccttgggccagcttggttttactctagatttcactgtcgtcccacccccacttctttcaccccactttttccttcaccaacatgcaaagtctttccttccctgccacccagataatatagacagatgggaaaggcaggcgcggccttcgttgtcagtagttctttgatgtgaaaggggcagcacagtcatttaaacttgat

SEQ ID NO: 104 - DNA, 309 bp, Homo sapien
tttttttttttttttatttttttttttgcatcaaaaaactttatttccatttggcccaaggcttgttaggatagttaaaaaagctgcctattggctggagggagaggcttaggcaaaacccctattactttgcaaggggcccttcaaaagtctctgggcttctatttcaaccgcgatgatgtggctctggaaggcgtgagccactttttccgggaactggccaaggaaaagcccgagggctacaaccgtttcctgaaaatgcaaaaccagcggggcggccgcgctcttttccaggacatcaaaaagcca

SEQ ID NO: 105 - DNA, 591 bp, Homo sapien
cttatttctgcatgggtcggagagtgggcgggactgctttactgagttatagtgaatgtagttttaacctaagcgcctcacatgactaactcctcatccatcaagaatgagctcagctctcacttccccactcctcacccccctgtaaagtaacctttctccaaggttatgcttcaacaggaatagctaacatttattaaattgtggcacgtaagtatcttggatatattggctcattgaatcctcacacctactattttacagagatgccagtggggcttgagattgaatcacttgcccaggctcccactgctggtaaacagtagagggggctcctgacccatcagtctggcttgacaacccattccctcaactgcggatcccggattcccttatcaccctgttgatttctccataggctgtggtaacatttgttgcatgaatggaccgttgaaatagggcctggcagggagaaattcaggaaatgaatgaatggttcttccctggcagcctttgatgacttacaagccccttcaagggggaaagccatttttctccctgggactccttgaaagcccgggagccctgcct

SEQ ID NO: 106 - DNA, 450 bp, Homo sapien
ctgccactcctgcctctgctaccccgaaaccggagagggagctcaataataacacaggtcccactaaactaattaaggtgttggcataacctgtcattgaattcaagtgtccaacaactgtttgcttaaaatatcattagacctaatatttttttcaaaggcacaaagtttaaacatggggggggcgggtgttgagaggggtctgggatacccttaaacccaaaaaagtgatttgttcccccttgcccagaagggtgactgttccactgggcctgtcaccacaggacattttccatgacaagcactcaccttcttggggaaggggcatcaggttggcacaggaaaggcccaagtgaggggccactctgtacattaatactttggtgattaatgtttggggagaggcaggattctcacccacctttttgacttcaaacactctcactcaag

SEQ ID NO: 107 - DNA, 116 bp, Homo sapien
tcgacgaaagttactgtcactcagttgtaaatccatcagcttttcacctgttaaaaattttgcaaaatatacatgttctcctcctgttttcaattcttccatcttttttcttgagg

SEQ ID NO: 108 - DNA, 291 bp, Homo sapien
ctgctcgaagttgtcaaaacccacgtgcagggcaatggagagtccgatggccgaccacagcgagtagcgtcctcccacccaatcccagaactcgaacatgttttgagggtcaattccaaactccttcactttggttgtgttagtagacagggcaacaaagtgcttcgccactgcagtaggatccttggccgcctggagaaaccactccttcgccgtctctgcattcgtgatggtctcctgggtagtaaaggtcttggaggcaatgatgaacagggaggactcggggttcag

SEQ ID NO: 109 - DNA, 662 bp, Homo sapien
gctgtttccacagtacgcctgcctcacaccttgcgatgcgccaacatcaccatcattgagcaccagaagtgtgagaacgcctaccccggcaacatcacagacaccatggtgtgtgccagcgtgcaggaagggggcaaggactcctgccagggtgactccgggggccctctggtctgtaaccagtctcttcaaggcattatctcctggggccaggatccgtgtgcgatcacccgaaagcctggtgtctacacgaaagtctgcaaatatgtggactggatccaggagacgatgaagaacaattagactggacccacccaccacagcccatcaccctccatttccacttggtgtttggttcctgttcactctgttaataagaaaccctaagccaagaccctctacgaacattctttgggcctcctggactacaggagatgctgtcacttaataatcaacctggggttcgaaatcagtgagacctggattcaaattctgccttgaaatattgtgactctgggaatgacaacacctggtttgttctctgttgtatccccagccccaaaagacagctcctggaccttgccccggggcggcccgctcggaaagggggcgaaatttcttcaagaatatttccatttccacaaacttggggccgggggccc

SEQ ID NO: 110 - DNA, 323 bp, Homo sapien
tcctgtgaaacagcccattttcctacctactgtgggttgctgctcaggaggaacgatatacgccaatacaagcaggaaatctgcagctcctctgctatgtgcctcagaacactttcaatttttctggtcaatgctctgattaggtatcatacataaaagccagcatattagtttaaatctctaacaaaaaactatattttccaaagtcattatcatttgggccaattaagtgatcttttcgtgctttgttgagcttcatctttagggcatctcttctttcttcccattcatgaagttcggcatttccatgtgcaaatttacag

SEQ ID NO: 111 - DNA, 336 bp, Homo sapien
tccagtgcgctccagccttatctaggaaaggaggagtgggtgtagccgtgcagcaagattggggcctcccccatcccagcttctccaccatcccagcaagtcaggatatcagacagtcctcccctgaccctcccccttgtagatatcaattcctaaacagagccaaatactctatatctatagtcacagccctgtacagcatttttcataagttatatagtaaatggtctgcatgatttgtgcttctagtgctctcatttggaaatgaggcaggcttcttctatgaaatgtaaagaaagaaaccactttgtatattttgtaataccacctctgtgg

SEQ ID NO: 112 - DNA, 218 bp, Homo sapien
tttttttttttttttttttttccagtcaggagtatttttaatcactgtctacagagacacctacatacacacacgggtggggaatgaacccaaagtttttaggtgaagtctctcagggcccaccccgtgccacagaccttcctcggttgcagagattctgggcaaagcatccgtgctctcatgagattatcctggggagatttagaagaattttgtgg

SEQ ID NO: 113 - DNA, 533 bp, Homo sapien
ctgcaccgacagttgcgatgaaagttctaatctcttccctcctcctgttgctgccactaatgctgatgtccatggtctctagcagcctgaatccaggggtcgccagaggccacagggaccgaggccaggcttctaggagatggctccagaaaggcggccaagaatgtgagtgcaaagattggttcctgagagccccgagaagaaaattcatgacagtgtctgggctgccaaagaagcagtgcccctgtgatcatttcaagggcaatgtgaagaaaacaagacaccaaaggcaccacagaaagccaaacaagcatcccagagcctgccagcaatttctcaaacaatgtcagctaagaagctttgctctgcctttgtaggagctctgagcgcccactcttccaattaaacattctcagccaagaagacagtgagcacacctaccagacactcttcttctcccacctcactctcccactgtacccacccctaaatcattccagtgctctcaaaaagcatgtttttcaagatctaaa

SEQ ID NO: 114 - DNA, 261 bp, Homo sapien
  misc_feature (1)...(261): n = A,T,C or G
ccatatctgctcggcgctacttctttcttggattgatcctgantgatgcattggcgatgcctttggagaaggacatgtgatgtgatggtcttcacgttccacatgtactcgggcaaatagggggacaaactgaagttaaacaggtcgaaactagaggagctgctgaccctggagctgaccactttcttggggaaaaggacacatgaaggtgctttgcaaaagctgatgagcaatctggacaccaacataggacaacaacgt

SEQ ID NO: 115 - DNA, 267 bp, Homo sapien
cctctcctgtgggttccagaccctgttccagcaacaattgctgggacacctgggccgactgctccacctcgccaggccctggccctctccatctcagccctgacagccacccagtgataaacacagcaggcttcctaagcaatgtgacgcaccagaggggtggtggtacacgttccccttgaagtcatctgaaaattagagaacagatttgcctcatagctgaagagagaccctattccaagcatgaatggccttgacaatgttcct

SEQ ID NO: 116 - DNA, 239 bp, Homo sapien
ctgatgacctggggtctagtgaaaatgcagggtcagattcagtgggtctggggtctgaatctctaaggcgctgccaagtgatgctgatgctcctggcttgtggaccaccctgtgtatagcaaagctctagactaggaggtctcaaccttggctgcacagaattatctggggagtttttaaatttcccagtgcccaggctgcattcatatcatagtagagacagggttttgccatgctgg

SEQ ID NO: 117 - DNA, 168 bp, Homo sapien
aaaaaacttttatattgctgcatcttccacagttctttgggtagtctctgaacttaaaatttgtaggagttgtagactacctaaatttttaagttatggatttgttcataggttgtaggggtaggtaaagaaggaaacagacaagaaaatggcttcttgaggtggcag

SEQ ID NO: 118 - DNA, 150 bp, Homo sapien
aaaaaaaagagtttatttagaaagtatcatagtgtaaacaaacaaattgtaccactttgattttcttggaatacaagactcgtgatgcaaagctgaagtgtgtgtacaagactcttgacagttgtgcttctctaggaggttgggtttttt

SEQ ID NO: 119 - DNA, 154 bp, Homo sapien
aaactgtgtgagatattaaccagccgccctgttataaaatcaggaaatccaaacagcgatttacaccgattaacacccccttttatattttttcaaatacactgagaaaataatcaaacgttttcatctctcttgtctttttttgttttttcct

SEQ ID NO: 120 - DNA, 314 bp, Homo sapien
ctgcgtggagtgacgggaggagggaatcactgtgtgtgcgagagtgcttcagactcaatttccaaaataattttcacccctctaagcatgtaaattcaaagatggatccttcatagaaattaaaaaatcaatttgagctcatttcgaatacagaacaagtatggcacagatggaagtcctgccacgtttcctttaatgatgctgactcttgtatcacacaggccagcatgaagtttcttactcagactttacaggcattttccgtaattcaatcagtcctgctcccagcacaacacaggaggtgattcgagaat

SEQ ID NO: 121 - DNA, 601 bp, Homo sapien
aaaaaaaacctaattcattgaagtaataaccaaataattttcaatcttgattcaactgtgattcaaatcttacaccatttgccccttctatgaatttatgtataaaattttttaagagtcagagtttttttttcttgattaattggatgtatttcacagaatttccaactgctcacgttagttttcttccttttagagttgatctctctaatgtattagatcttcatgcctttgatagtctctctggaataagtttgcagaaaaaacttcagcatgtgccaggaacacaacctcaccttgatcagagtattgtacaatcacatttgacgtaccaggaaatgcaaaggaagaacatcttaatatgtttattcagaatcttctgtgggaaaagaatgtgagaaacaaggacaatcactgcatggaggtcataaggctgaagggattggtgtcaatcaacgacaaatcacaacaagtgattgtccagggtgtccatgagctctgtgatctggaggagactccagtgagctggaaggatgacactgagagaacaaatcgattggtcctcattggcagaaatttagataaggatatccttaaacag

SEQ ID NO: 122 - DNA, 486 bp, Homo sapien
ctgtttctaattgcttttgtgactgttaccttttagttcatgcccccccaaagagctaaatttcacatttttacctacaaaattgatttttaattcctgcaaataatttaccattatgagctacaaggtgggcaacagcgcctgaggatctaattttatgcatattactcccaagtattttaacacttgttggagaagcaatatctggatcaataaaacactgtcccatcaaccatttgagtggggagagggagaagctcttctgtaagtaagattctggcaagctctttgaaatgagtcttctttcccacagattttctctactctttcaatacaaacagataggagaagagggaatagaaacctggaggaacttgaatatttttgttctagatagagatacagttattgaaaaggaaacctagaaagtagtcacacgtcgcttatttaggccagaagtaattgtactgggcaaaaatttcactt

SEQ ID NO: 123 - DNA, 239 bp, Homo sapien
ctggtgggtctttttttcctctcagagctcaagcctgtagtgcctgatgtcatttctttcaagttgcccacagtatctccacttaaactaggctagtaaccaaaataatgtggaccttctttaggaaacagtgtgggagaataggagtccagccgtaagataaactggaaatatttgggcgtcttgtacctggctacgcaccacctcagtgttgttcctacataaacaaggcccctttt

SEQ ID NO: 124 - DNA, 610 bp, Homo sapien
  misc_feature (1)...(610): n = A,T,C or G
ccanccaagtcnttgatgatcactgacccncgcgcgcctgctggaccaaggtggctgcggggaaatcgccacngngctttcggttttcttggtgaaggaatacaccgcgccgacagcaggttttcagtcagggtcagggactgttgcttgcgcgcgaaaatcaccggtacgccgaggttcaggccggtcatgatcgccggtgcaatgcccgaggcttcgatggtgacgatcttggtgatgcccgaatccttgaacaacgcagcgaattcatcaccgatcagtttcatcagcgccgggtcgatctggtggttcagaaaggcgtcgaccttgagtacctgatcggaaagcacgatgccttcttcgcgaattttcttgtgcagtgcttccacgaaagcttcctctgttggcgcaacacgcgccgaaagtagattaaaaagtagtcgattctagcgctttaacatcgcgcgtatatccgccagggcggtattgccgcgaacggctttgacttcggttggtgtgtcgtcgttgccttcccatgccaggtcatccggcggcagttcgtcaaggaaccggctgggggcacaatcaatgatctcgccgtactgcttgc

SEQ ID NO: 125 - DNA, 196 bp, Homo sapien
ctatagggctcgagcggccgcccgggcaggtaaaaaatcagcccctaatttctccatgtttacacttcaatctgcaggcttcttaaagtgacagtatccttaacctgccaccagtgtccaccctccggcccccgtcttgtaaaaaggggaggagaattagccaaacactgtaagcttttaagaagaacaaagtttt

SEQ ID NO: 126 - DNA, 247 bp, Homo sapien
aaattagttaaaaaaatgcattcctcatttgatatagccacattccaaatgcttaaaagccgcatgtatctagtgactaccatactggagagtacaaatatagaactttacccgtcactgcagacagttctgttggattgtgcagcattggacaatatatacagtttgcctgtatatgagaaagagagagagagagagagtgtgtgtgtgtgtgtgtgtgtgaagtgcaataaggctgacaggcatc

SEQ ID NO: 127 - DNA, 590 bp, Homo sapien
cctccacggcatggcgcaattgttgttcaggggccgccaggttgctgcccatgccgatgtagatacgttccacgtgcttactcgccagacgcactcgaagcgtcgccagcgctacgtttgcgcttgctgccactgctgcggcgacgctttttcgggccatcgccggtggcttcgcctttgctgctgagctctttgatcatctcgcggcgctggctgtcgttggcgtcctggtagtcggtccaccactcgccaaggccgtcggtctgttcgccggcgctttcacgcagcagcaggaagtcatagcccggcacggaagcgcgggttgtccagcaacaggtcggcacgtttgccgctgcggcgtggcaggcgctcctgcatgtcccagatttcacggatcggcatggtgaagcgtttcgggatggcgatgcgctggcattgctcggcgatcagctcgtgagcagcttcctgcatggctggaattgccggcatgccacggtcttgcaggcgcatgacgcgtttcgaaagcgcgggccacaacagggcggcaaagaggaacgccggggtgaccggtttgttctgcttgatgcgca

SEQ ID NO: 128 - DNA, 361 bp, Homo sapien
ctgcccatggaaaccctccaggagctgctggacctgcacaggaccagtgagagggaggccattgaagtcttcatgaaaaactctttcaaggatgtaaccaaagtttccagaaagaattggagactctactagatgcaaaacagaatgacatttgtaaacggaacctggaagcatcctcggattattgctcggctttacttaaggatatttttggtcccctagaagaagcagtgaagcagggaatttattctaagccaggaggccataatctcttcattcagaaaacagaagaactgaaggcaaagtactatcgggagcctcggaaaggaatacaggctgaagaagttctgcagaaatattt

SEQ ID NO: 129 - DNA, 546 bp, Homo sapien
aaaaatacaaattcagtaagacttttgctctaacaacaatttttcaaaacgaatcaacaacaaaaaagtatccagtgtttcttttcttatgaagatataataaaacacagtattggtaagcacattttaacagtatgcttttcttttgtagggaaaggagatatggctatgtctaacatcgtgggatccaatgtgtttgatatgttgtgccttggtattccatggtttattaaaactgcatttataaatggatcagctcctgcagaagtaaacagcagaggactaacttacataaccatctctctcaacatttcaattatttttctttttttagcagttcacttcaatggctggaaactagacagaaagttgggaatagtctgcctattatcatacttggggcttgctacattatcagttctatatgaacttggaattattggaaataataaaataaggggctgtggaggttgatattattaatagtgttatgcagaaaatatgaatggcagggaggggcagagagaaaaatccatttcttcattt

SEQ ID NO: 130 - DNA, 733 bp, Homo sapien
  misc_feature (1)...(733): n = A,T,C or G
ggggcctcttcctaaaggcactaatcccatccaatagggcttaacctcatgacttaatcaactttcaaagacaccacatcctaatgccatcacatcagaatttaggcttcaacatatgaattttggggggacacaaacattcacctcatagcattcattgtttcttgttattggcaaagccaagactcacattgtctaagttatttgacttttgagtccgcagatgtgaaaacagtgctaaacagtccagcttcatgagtggagaacagcatttgtgacaaccaccaaagtacctctgtggtcagtgtcctcaaccagggcacagcatcatggaccagagcctctgcagggcacagaggagtggtgaggaacaggggctctggagcaaccccacttccctctgctttgtatatggggggttctgcacatgactgcatttgaaaagggcttcactgcgcttgctgaaggagtgcacttgagctagcggagagttcccagagggtgtctggaagaagcaaaggctattctttgtttcactcagttatagatggaagtcagacacttctgcctgaagtactttcacacactccacagtcttaagaaggatgganaaagcatgccaactactcanaaaaccacaggtgttcaagcaatggtatccttttatncctacaactagtggacaaagnggggcctctgtaatttgggaaagctaggaaaactttttctgggg

SEQ ID NO: 131 - DNA, 305 bp, Homo sapien
  misc_feature (1)...(305): n = A,T,C or G
aaacacatacgaatanttnaactgtgattatgaagtgacagccggctaaatatgtcttgtattttctctcttcctttttttgctaactcatcctttattccattcctgcttccatggtaatgcaggctcaaataaattactaggatacaagattacttcaagcctcttttctgtggaactcataatatgataagcatttgttacaagattgcctgtagttgtttaggggacaaattatattagggaaagaaagtctttctttagttggttaaattttctattataattgggtactaaatttattt

SEQ ID NO: 132 - DNA, 545 bp, Homo sapien
aaacaatgctacactcatttttggcaaagtgctgtattgttcagtctgtgtacaaaactgaccatctatgaaccaatcagtataaaaaatttctataaaaacaaaatttagacagcggctcaagaaaacaagctgccatttatgcatagattgatgtacagtaacctaaccaaatgtcccttttgaattttcaagttactgaaaaaaaatgtgtcgagaaacacattaagaaggcacatgtacagtctacaatactcttcagtctccctaactcatgccctgcccctataaaggaaatatgttcacaattttacttgagaaaaaaaaacaaagccacttaaaaaaaaaaaaacacacacgcaattattaaagttcaaaatctctggaggaaaatacaagcaaaaccactcatacactccaagcctgaaacacacatctaacctccccaggtactggtttggttttcagaggtccacctagaaaacaaatctaaaacttcaggcaaaacagagcaaaactggacatttaacaattacacaattttt

SEQ ID NO: 133 - DNA, 330 bp, Homo sapien
  misc_feature (1)...(330): n = A,T,C or G
aatatttattactaatatcttataatgttttgtggnaccatggcataccttgggtactattgtaacanatagttcaggaaaccctactataaggtttatcaaatggtctcataaacagttacttattcaagcacgccaaagctcagtgaaaagtatttttcacccttactctttctcgtgtcattcaaagagaagttttgatgtagtgtatttatttgtagggagtaatgaacagatccatttcacagtagactttgtgctctaggtgatgcagctaattgccccagtttggaaaacatggacttggatgaattgtcttttgtttgggac

SEQ ID NO: 134 - DNA, 627 bp, Homo sapien
  misc_feature (1)...(627): n = A,T,C or G
aaatattacttcaaatacattttaaagctcaacaaacttgtgttgaactgaattgcagatcctgaactctatttgaaaatacatcatgaaacagaaaancccattccaaatgaaaatgatagtgctttgttgggggtgggaatgaggcggggagactaaatcactattaacagacttcttttcccaatgcaatttgtcaaaagttcaaaagttctgaaatgtactaaatcttaagcaaattaaattcatgatattactaaaactttttaaatagtgcaatgacttatcaagttatagtggctgcattaagaacaaattattgtgtgaaatacctgtataaacacaaaatacaattaaatatttctttacaaaaagctgagcattacgcataatagtggaatgtctttcattaggtgtattttttaaagattaacaaaagtaacatttcctaaaatgtatacatgtgccatatttttgcaaacatgcctgagaatgtatttaaaacatttctgtagtaagagtttgcaagaacttcacaaacctgcaaataaaatgcatctttttaaaaaggtgaaaatggcatctccacactgcaacaattcaaaaagtgcagcatccctaatcttt

SEQ ID NO: 135 - DNA, 277 bp, Homo sapien
  misc_feature (1)...(277): n = A,T,C or G
aaaatcaaatatattatttgttaaaaatcagcttgtttcattacnggaaattacaccagtccgttctatttactttcaaaccatattcaactcctcaactttcaaacatgtaatcaactaatttcaaaagggaaaaggtaccctttataaaggagagatctgttaagacaccaagaaatcaaaattaatatcacttaataattaagtggataacacatgcctcccaatacagtgcagtgagaaacacaaaacatcaattcccgcgtactctgcgttg

SEQ ID NO: 136 - DNA, 486 bp, Homo sapien
aaaacagaatgaattcattgttacagttacagaagtcagaagcccaaatacagtctgcctgaaccaaagccagggtcagcaaggttcctttccactgttttgccaacttctagaggccacctgtattccttggttcatggcccctctcttcatcatcaaataatcagcatagctttatgacattggcagctctgattttgctcttttgccttcctcttatgtagacccttgtaattacattgggtacacccagataaccccaaataatctccctatctcaagattcttaatgtaattatattgggaaagtcccttttgtcatataagataacatagcaatggattccaaggattagtatgtgagtttcttttgaggggctataattaaccctaccacaatatggaaatgtctattgtttttctatgtaccagaaataagacattaggatgtgaaattaataacataacaccacttacggcatcacc

SEQ ID NO: 137 - DNA, 552 bp, Homo sapien
  misc_feature (1)...(552): n = A,T,C or G
ccatcttgcatcaaatgttcttaaggcagtgactggctatcaaccacagtttctgtctccccagttgcaaacacaggatccatgcaacagttctgagaccatacacttagaaaccacaggggatgcggatcaaatgcagaactcccaaattataaaacagtcaggctacactcaaaacaaaacatagaacatcaacaacacacatctcccaaaaaagaagtgcaacgcatgcttgtataaaccaacaataacaaaaaaaccacaataaaaaatgcagagtctcccaaacaagttttcaaatgtattgcanaaagaaaaaaaatgtatatatatataaaattaaaaagtctgaaatactagtgcatagtcaattacctaacaccaagtttcttttctttctgtccaagctctactgcccctctgatactagcagcatgtctacaggctaagaccatagcagcaaaaaacgtttttcatttggcatttacaaaattaaattactgaataaaaatataattttttataaaactatttcttacagtaataattttt

SEQ ID NO: 138 - DNA, 231 bp, Homo sapien
aaattttactagtgttacttaatgtatattctaaaaagagaatgcagtaactaatgccctaaatgtttgatctctgtttgtcattactttttcaaaatatttttttctgtaaagtataatatataaaacttcttgcttaaattgaatttctatattagtggttaattgcagtttattaaagggatcattatcagtaatttcatagcaactgttctagtgttttgtgttttt

SEQ ID NO: 139 - DNA, 535 bp, Homo sapien
cagttgccaaccctctgaaccgtttaggccggttcatcgctgcctttgaatctgggccggtggtgatccggcaaggggtgaaaccaaagagcgggggctgtgaggcccttcgcagtccctcgtaagtcgctgcgatggagtgaactatcacgcatcgtgtttatttcgtcaacacgaaatgtgatttatttttgcgaattaacacggcagttctcggttacgttttcggaaagcgtgggatatgattctgtctatcctgtacggatatacagtaattaccgggaggggattccatggcgaagaagcaggcggcaccggcagcacggcaggaaatgagcggtatggcgcgcctcgggcttcgcgtctcatcgatgattaatcacccggtcgcccagacgcagcgctgggttacgattcatcgcctggacacggatggggatcgggagtgggaagaggttctgagcgtgatcgctgataccgacgagctcgagctgacgctcaatgacgatggcagtgtgacggtgaggtgggagca

SEQ ID NO: 140 - DNA, 640 bp, Homo sapien
  misc_feature (1)...(640): n = A,T,C or G
acattggtggcacttgaactgagtgcaaaccacaacattcttcagattgtggatgtgtgtcatgacgtagaaaaggatgaaaaacttattcgtctaatggaagagatcatgagtgagaaggagaataaaaccattgtttttgtggaaaccaaaagaagatgtgatgagcttaccagaaaaatgaggagagatgggtggcctgccatgggtatccatggtgacaagagtcaacaagagcgtgactgggttctaaatgaattcaaacatggaaaagctcctattctgattgctacagatgtggcctccagagggctaggttagtacaaactcgcattcatggcttggtttcccagaagatctccatttaacttttttaaagaaagtttattgctttctttaacctgcattttttctaagttttttttcgcataaaggtgctgtctttgtggcaaggcctaggcatgacaatcggaggactcgagggggatggaggactagtgatccggctggctgcttccagtcgattagagaggtgaaaaagctgaacgtgtgcccantnaatcttcaaaaaggcagaaacatatcaccttntgcccccntaaacttgttctttttccgaaggggaaaaaaaaaatggaaa

SEQ ID NO: 141 - DNA, 127 bp, Homo sapien
aaaaatcacacactgacaacacagaaatacgaaatgctaggaaaagtctagcatatgaaggaaaaacatgtcttatgcactctaatataattttttcaattagtataaaggcaaatgcggttttttt

SEQ ID NO: 142 - DNA, 126 bp, Homo sapien
  misc_feature (1)...(126): n = A,T,C or G
aaatatcctctggatgcnttcaagtaatactaatcatttcatgngnaaaagtcttttaataaacaaattcagagtaaaattaattgaaatatttataatacatttgttacacagttatttccaata

SEQ ID NO: 143 - DNA, 730 bp, Homo sapien
  misc_feature (1)...(730): n = A,T,C or G
gcaagttctggagtgttcacttctgagcctgaattccctcccctgcaaaatgggggaataccctcctcagagggtccctgcgagggtgaggggagatcagcatggcaggtgtgctgggcacggcagggcctgggaagggcagatcctttccccatccctgccacaaacaacccaaacctttaaaggagagcaatggccttgtgtcaaaaacaaaaacaaaacaaaaccctgtcctaggagactggggccctaatttctaatagcaagcctttatgagtccctaacactctactgggctgagtatctcacacgccagaggataacctgccttctgctcaccaccaccccgtagtagttgtcattgtgtccatttcacagatgaggcaaaggctcagaagagtcatgtgttaaaccagcttctagagcccatgcaggagctgcaggtggggagaatcacctctaggtgctcttcccatggaatcctcaccctccttgagtggtcactcactcanctttccaatgggtgtgtgacctttgaccagctttctttccttntctgggcctcagtttcccaccttggacaaagtaagaggtctcttgggnttcanggtagttcttcctaacttcttttccttttcatttgagcatccttcttcattttttgccacctctcttgtcattacangcttttaccttcggccgcgaaccacgcttaagggcnaaatttcca

SEQ ID NO: 144 - DNA, 485 bp, Homo sapien
ctggtcagaaatgattctcttgtgacaccatcgccacaacaggctcgggtctgtcctccccatatgttacctgaagatggagctacctttcctctgtgtggcattttgtcgcttatccagtcttctactcgtagggcataccagcagatcttggatgtgctggatgaaaatcacctgtgttgcgtggtgggtctgctgccgccacttctaatcctcatcatgacaacgtcaggtatggcatttcaaatatagatacaaccattgaaggaacgtcagatgacctgactgttgtagatgcagcttcactaagacgacagataatcaaactaaatagacgtctgcaacttctggaagaggagaacaaagaacgtgctaaaagagaaatggtcatgtattcaattactgtagctttctggctgcttaatagctggctctggtttcgccgctagaggtaacatcagccctcaaaaatattgtctcaacag

SEQ ID NO: 145 - DNA, 465 bp, Homo sapien
ccaagacagctcgtttctggagagtatgagggtgtgttttcttattgtgaaaggaactaccttctcttagagggtaggaagaatgtggtgtgtgtgtgtctcataaagcaaccggacattataggtgcccaggtcatctataaaaacgatccttgggctgtgtaaaaatgaagtggcttttcagtatcctctttcacacttgctgcttcgggagactatgcaatgatgggaaggtgattgcccctttatttcattcagtgccatggtccctgttgttgtagtaatttatttgtttagttcattttttttttcttaacagtcaaggggaagagtgattcctcacactgctttcaagctggactgagccagtctcattctgggaaagaaatgctgtgtccagaactcagcagctccatctattttttccagtcgaaagaaactgatctttaggcagtttttacttgg

SEQ ID NO: 146 - DNA, 351 bp, Homo sapien
ccagccggggtaatctgtatgtggcggacttgagctacgacgtgggcggcaagtgcctgtttgaccagatcagcggcgtgaagcttatgccaactcatcgtttgataaatccgaggatcagttcaagacgtcgcagcgggtgattttgggaacgtcgttttcggtcagtaaattgtgggtagcgacggagtggttgatcggcaagaatgatccgtatattggcgggagcagctataccgagagcctgggggctggggggagtaaccagtgggagaatcagttatatatgaacattgggtactacttctgacttaagatctccagcgttttaactggccttatcgcaggcaa

SEQ ID NO: 147 - DNA, 654 bp, Homo sapien
acttatttttaattactgaatatttcttagacgttttgggacagattttatgtaatctttataagtatgatttctgaagaaaagcaaatgcattagtatgtttgccttaaacttgtagactaaaccaagtattgtaaaataaacagcgataacagtgatagtttttaactctatggtcattgtatcactctggaaaatgtggagtagctgtaataaatctactcctgtattatgctttacagtgcaggtcttagtttttcttttttctcatttcttttgaaatggcatctcgaacaaagtccaccaatccctttacaaaagaatgaactgctcctctgtgtgtacttcatagaaggtggaatcggacagaggcaggttagtgacagttattcctgaaatacaggagcagagtacagtctgttgtggtttcccggattccgcgcctagctcagccaattaagcatgagacataggccattgagccacttagtagttatgcgagtggatagattggtatgtaagagggaaagaggtctgctgtaaagaacaacacttgtttgtctgtggggaaagaaaagcagaatcttgagatgaaagttggcatacaaataggatactatcgccagtaggttatattacaaaacatttatcggg

SEQ ID NO: 148 - DNA, 539 bp, Homo sapien
tgaatatcatgagggtgattttcacctgattgcaaaactgccatagtttgaaacactttttcaatttaccagacacactctgtcaagacttcatatacttccaacttgcaagcctgtgttttgccttctccaacctaaaaaggaaaagctttaaacgatgaacttacattctattaaaccatcagacttgagcttatccatctgtttagcgtgaatgtacaaaccaggtacatttccaccaaacacatagaaaaatcttgtgcatcacagttcagctaagggtagtaggacaatccttacaatcctccttggatttcttttttaagatgtcaaagaagcaggtaagcaacattgttcatttgttactgggtgttctagatcaaaccttcacaagctatatatatagcttcatatgctatagcttacaaatggggtaacaaagtaaaagaaaagaacaaattatactttgacactttatagtcaaagtataattaaaaaagaaatcctacagtgggtaatggagaaatagataatttttc

SEQ ID NO: 149 - DNA, 273 bp, Homo sapien
tttttggtcattctcctcaaggagccgctggatagtagtcttgattgacttccaccttgcccctcatacagtccggtactaaggccaccgacatcccgaggaacctccggaaccacgaccgccaagcaactcgacccacgataggtggggcctacgctctcgaagttgattggatgctcccgcctacagggcggggtacagaagggacgtcatttgtgactggacgcgcaagagctatactcagcagctttcctctgtcccagcccctagaac

SEQ ID NO: 150 - DNA, 200 bp, Homo sapien
gtttttactaccgtatggcccatttaaaagggatgtgtacgccttacactataacccttaaaccacctagaaatatgaaactcaaactgccactgacctccctcaccaagctccataaaagtaaaaaattataacaaaccttattaaccaaactgaacgaacatatgggcgattgattcattgcccccacaatcctaggg

SEQ ID NO: 151 - DNA, 515 bp, Homo sapien
ctgtagcgatctttaagaatattttatatatgaaatctggatttagggttcccatggtctggcaccactgggtacagtagttctacatggcagtaattcattggagttgaagcagtgaggaaagagtcaagtactagtcttttatcctcagtgtccagtgactgtcaagagaaatgggactgccttctgcattgggatatgtgggttaaagagtagtccaatatagaagagtgagaaagtgmaccctctgaggcatagtaatgttttattkraaaacatctcacatgtattgaatacttasataggatgtattctgtattactgaattttccagattattgaagcaatcacctttctgtgtttaaagttttagaaagaatgcttttaaaaatgcttaacataagataagcctgttttcatggtgcaaggtcctttctatgaacatgaatcactggactctgagggttggactaagatcacatctacatcccttttaaatgactagtgtgctcaga

SEQ ID NO: 152 - DNA, 243 bp, Homo sapien
atttcaacaacatacttgtcgaggtagttataaatcttcttagggggaggtggtggtttctgttggaatgccaattttacagcttctgctgctgattcaggttctttaattatgcttttctttgagtctgcttcagatagcacaacaaaaaaatgatgacacttttcacacttgacaaaacgggtggatgatacaaaaggtctctacatgtgtgcacaagtcgccacatttaggacagcgcag

SEQ ID NO: 153 - DNA, 620 bp, Homo sapien
ttgtcttctctaccttaccatagccagttgctttcattttaaaccagagcaagtaacatattagtgacttgaatcttcataagttaaagtaaaaaacagcaaaaaacctagatctttgtcttttagaacacagaccattttcaggaaagcagttagctaagtgtttaattcatgaatattgtatactgcatcccctaccacaatttacacaatcctgtggatagtcctacctcaccctggtcaacctacatgatccttaagctaatggcggatcacgatgaccttgtagacatgcacacaactatacctttgtccaacagatcataatatatctgctatccaactggttttacctgcctaatcctactgatttgggcactgcttgtatagtctctcaagttcacaggaaatgttgattttctaaggtcctcatttttacagagtatacaggcaaagtgacaggggaaaaggaattagtctaagagtaaggggatgattattatattgaggctaaaaccacaaagtggctcaggctttaaaaaaaaacactgtggataatgacaaaaagcataagtaaaaatattttgagaaaaataaagtacaagttttgaacacccccc

SEQ ID NO: 154 - DNA, 843 bp, Homo sapien
cattgttagtgacccaagtaaatttatagtttttaagttcagaggaaaaataaagcctattttttgttaacagtcttaataaataataaaatggaataaagaaaccaaaaaaaaaagaaaaagtttgtatgaaaattcatccctatttctttattttggactaagtagtcaaatttctactatattaatattatgtaagcgacacccatttaaattcactctctttgatagaaaggtgagttgattatcacacctgctattttttcactgccaaaragactgcaataacctccctccatcaccctcaaaaaacaaacagaaaccatctgaggcatagccattgtttacatattgtgtttgtgtgcacctatctacaacgttctttcttctaaggagtttatctgccaatattttcggcttcagcagcagcgctcttcttgacagactaagagaaggatctacagaaaagtcatctgattaaggttttgggtcaaattaaaactctctggacagaatcctctttccttcacttggatttctgcaaacagaaagcagattattctcctggcacaatagcgactctagaaacgcttatgtttttcagactttggcagaacttgttaagaacagcatcatcataatacatttgtacaaactcgaatttcagtggctcttttgtcccacatgatgcatgatgaaatttataaaggtctgttttacccccacagggtcatttcttttgtgttcctacagagccaataggcttcatttaagtccaagttattatattaaccatccctttcactagactagagaacttctttttcatggtccatatcgtga

SEQ ID NO: 155 - DNA, 674 bp, Homo sapien
tttcgtgtcagccccaggtttgctccagctattcacaagcagaatataacacaagaaaaacaattcatatcccttagggaaaaaagaggatcaattcatcactcaatatttaatacagccaaaatgagctgccaaaacaagcacacacacaaatactgtgaacagaaaaatacaagaaaatgactaagctgggagtcttgacggggtatggacattgcttaaagcacttatcagtccccagaaaaaccaaaccaaaaacattttttacgatggcatggcctcatggccccctttaaaactgttgatggtaacaaagggcagggggtggggagagaaaacacaatcactgctccctttttgctcgccagtgtgactgcacccctcacggcaccggcatgtacacaactaccacacaaggaggaccaagtccctctgctggtggcctcctaaaaggcaaggcttgagttttggctgatgagcaagttctctccgttaccaatccctgccaaccagcactaccatggctgaattgatctaccgttttcctgagtaaactgtaactggctacagtttcggtaacatggaaaagaactcagctactacagccaactgcaatacttcaggaaccccctccatccctggggctcctcactcctagtgcatcttgattggat

SEQ ID NO: 156 - DNA, 671 bp, Homo sapien
cctttagtgaacacctttatctccatgtccctcttagagcccagagagctgcccataggcattttccagaattcctcatgtcacctagttcaatttccattaactcagatcagccattgtgattcaccatttgtcaggctctcaggtttaacaaaacctactatcaccatcatccttcaacagccacagtctgaattgagccaacatttttttttctttgagaaagaagtgggctggggcacaacttttagtctgaggggagctagtagtcggcttgacaattaaagccatccataacaacttttcctcaaatgtgttgactcctcaggggctaaactgctcttagcttagaattatgctttactagagatctaccatataagtgggttaatcactaccatcctgtaactagttatatagcttccagacatgagggagacatcaaacagggatggaagcaaccccaaggatatgcaagaagggcatgatgaacccccttccctctggcaggagaacaaggccaaccaagggacagactggaaagcacttagatgtttaaggaggagaaaggggaagctttgaccagtccttgccttttgccaagttcagccagttctccgctgcttgcaacctctagcgcagtaacattttgcagaattgcagattttccc

SEQ ID NO: 157 - DNA, 474 bp, Homo sapien
cgcgttctttaattctttaagcctagaaagtcctttacactacttacctaaaggtcccaaagtaaaacacacactagtagtaaggctagtgcatttcccttctagcactcaaagaaagcttaacatttttgacagtttgcaaataccgccttgtatttctgattcagccttattcaaagtatcataataaaatatttattaaatstatgttgatctgcgtgcatttatgatctccagattaacgttaggcttctctgttgggccctaacttggaggtgcttttttggatccctcctcccgtgattcattgtaatttcatttcccttgtcatggctctgaccagagaagattctaaatatctgcccccaaagccaaaattatatcttttgaaaagtgaaatgaagagttgagtcastaatttattttagatattactgcctaaaacaattccccaaaatttatggaagttggagg

SEQ ID NO: 158 - DNA, 584 bp, Homo sapien
ttggattctgcagttccacatcattcactccggcaaaggagagaacttgtaacaaagatgagtgccaagtttagtcaatttaccctacctggaatactatatacaactctgggtctcatgtgtgttaaaatacatacagtgaagctgaggaagagccactgaagtaaaaagtattgtttacaagttggaaaggatgtaaaaataatctaaagtatactaagtcaggaataaaaggcagagttaataaaattgtggctggtactgatagacgaaacagatatattttctaaatcctggaataattattaaaaaattttacatgtatcaatggattccagactccatattttaagtttcacaactactgtcatttaaaactataccttattgaacgtctcccactctcaataaattaccccaaatcactcttctccaaaacgtaaatttggaacacactgacttacaaattttgggcttaatttataggatgttgtggccctcaaaaatatcattgtgggctaaacaaaataaattcttgaaacaattctaaaaatcaatcattgtccaaaatgaactttttctaa

SEQ ID NO: 159 - DNA, 671 bp, Homo sapien
cctaattttattacttttcttgccactgctattattgatagaaatacaattaaataattaagatgaaccaatccattggaagattactaaaattgtatcttcccaatgcctcctacagtaagatttctttataattataacccttggagacaatttgaactttatttaaatgttctgctcaaatctaaatttccttctcctaggctgaagcctgatctaaataaggaagtagttgggatatatccacaggctgtcgaacatggagctgcatctgagagacaggtggcagcaaccaaaagcaaagcagggactgagaacaggcaggttccaagagcaaaatggaacttgaaagccaagtatggttcactgtaaaggagaaaatatagaaatacggaactagaacacctggtctgggatgtggtaagcacccaaaatataggaaaactgtatgaattcttgtgaagcagtaaactatgatagtaatcatgtgacacatatgataacaaactcaaaacagggaaaagaggggctttattcaatgctggagataagtgaaaaaaaaagtgaagtgtctcaaggacagaagttatcatctcaaaaaggcatatcagctagatctcgcggaaaccatatgattatcataattctagactctgttcggtattacaaag

SEQ ID NO: 160 - DNA, 315 bp, Homo sapien
ccagagagggagggctctgcttcaccacagggcaccagaagaggactggtgcgcgggaagaccaggtaatcataatgctattaaaaatagcagtaatcatactgttttatacattgtataatgtcataaggattttaactttcatgtaacataattgctgtaaaagtttccccagtttgttttgtgctatttaccctggtgttaaaatgtgtaagaatttacattttaggtatgttaggtttattcctttttatatggtttctgtttgaaattttgattttagaagacattcattctcaaggtcataaaacacac

SEQ ID NO: 161 - DNA, 607 bp, Homo sapien
tttytgtgtcaccttggataattgcttaacttttaaaatttacgttccctcatttccaaaaagggattataactcactgttattttgataattgagataaatgtacgtacaagtgctttgaaactgtaaagtgcattataaacagagggatttaccatagaggttctaccttgatgtatcaagagaagccttttctggaatctggtgcagccttgtgagatgctgttaggtaaggggactccttggtagaatttcttacatttgtgtaaaaagttctggttcctgagtaattccaaagaagatgctatgaggagttcactgtgcctttgatttgatcccaatgggtcagaatatgttttctcattcagtaggctactacaggatttgaagtagaaaaaacagggtccagtgaccttcacgggatcctagatgttcatgaatttcaatcatttgagattgtggggtgtggtccaatgctgctctcaaaaagatgttgcctttcttcasagagcattaataactaaaaaatcccctggtcccaaatttattgtgtgtmtctgaaggctttaactgaagaaatgaaawgcacactcatggaacaaactaa

SEQ ID NO: 162 - DNA, 443 bp, Homo sapien
tgagttttgaaaaagtgaataatcaaaaggaaaataattccttgttgttcataaattaagcatcactaaagtctcttgaaaggcatttctgtattgggcaagatttaaaatactaaagccttaggtcctattcatatttaaagtagcatgtttgtaacctgttactatttggagagagaagcagttgcctgccacaattgaagactacctttcaaatagcaaaagagagagagaaggctgatatttcgggcttttaaataaagatttgtgtggttctgcttttactgtaactgtcactttcccagtgaaaatgatttcatatacatttgagggtcttacasgtatgggtaaagttctataaattgcaacaaaatgatacccaatttcattttatcctttttgtattgtgaaactggaaactttatgacattgtaaattatcag

SEQ ID NO: 163 - DNA, 686 bp, Homo sapien
caggcaaattatagtcaaatacatcacccccctcaggcatctgtggcaaggcatccctctagagaacaactaattgattacttgatgctgaaagtggcccaccagcctccatatacacagccccattgttctcctagacaaggccatgaactggcaaaacaagagattcgagtgagggttgaaaaggatcccagaacttggatttagcatatcaggtggtgtcgggggtagaggaaacccattcagacctgatgatgatgtaagttagctttgtatattcttgaaacacctataaagttttatttaccgattgaatacttaaatgtaagtgaaaatctaatagatgtttatgtaaatctaggtagacatcacctggattccccactctattgcttacctttttgttttgtaatttgatcagttcaagttaaaacaatttaaccaaaaactatgaatgtttatgatataatgaaatgattgttaactttcttattgctttttcacacacctataaaagtaattttattactcccaagagaaatcactaaaggcagaattactagaggtaaaaataactagggttggtacagtattactcaggagaagtcaaggggagaaaacttgtcccaatgattcaaaataattttggcatggggggggggagggaaaaaaatttggcttccttt

SEQ ID NO: 164 - DNA, 706 bp, Homo sapien
ttttttttgtttcatttgctgcttaaaataaaaattataaattagatttaaatggagcactaattataaaacagattgcaagtaccaccatttgaaaaaaaaaaaaaaaatcagtggatttccataacacagaaaatgcatggacatgcatctacagtagagttaaaaatttcctgtgactaaaaaattaaaaactggaatcaccagtagcaaatgtatagtcaatggctatgacaagaacagatcctgccgagctcataaatgcaattattggcttttttgctttataaaaaagacattacatattttattgcattattctcctaataaaaaacatactaccacgtagctctccccatccccattctttgcttccagatttttatagaaaataactgttttagtctggccttggaaagtgaacccaccagcaccaccttcacctactcactcttcaattcaatatgcacatagcaaaagccaacacttcaaatctcttgcccacatcaaaaaaagtagtttcaggagaaaaacattaataccagttgaataaaaataagggcataaaagctatgagagagatagctctgccatctgtctctgggctaaaaatcaaggctaactattgcctttggcaccacaaggttcaaggtccatggttttattagaaaagtccccacaaaaaaattaaacccccctcacccca

SEQ ID NO: 165 - DNA, 427 bp, Homo sapien
tyywgggcaattaggcaggagaaggaaataaagggtattcaattaggaaaagaggaagtcaaattgtccctgtttgcagacgacatgattgtatatctagaaaaccccattgtctcagcccaaaatctccttaagctgataagcaacttcagcaamgtctcaggatacaaaatcaatgtacaaaaatcacaagcattcttatacaccaataacagacaaacagagagccaaaatcatgagtgaactcccattcacaactgcttcaaagagaataaaatacctaggaatccaacttacaagggatgtgaaggacctcttcaaggagaactacaaaccactgctcaaggaaataaaagaggatacaaacaaatggaagaacattccatgctcatgggtaggaagaatcaatatggtgaaaatggaaaaa

SEQ ID NO: 166 - DNA, 124 bp, Homo sapien
accatgttttcgttgtgtgtgagcagggaagggaactttcctgccttatttaaacctgggccgaggattcgtggaatctgcttgatcagagactctgaggccaaaaacgcatcatacttcttgg

SEQ ID NO: 167 - DNA, 232 bp, Homo sapien
tctgcatagcaaatatgatttaagaatttaacatcattatttgatcacaagcgtaaatatgtcaccataaataaatgtaaattcattgtacaaaaattcccaacaactcttaatacaaatatggtacatttgacagtttctgaaacagattatttttaaaactttttaaaacctaagctttatttttttcctggttattagacacacacaaaaaaaataaaaagaggctggg

SEQ ID NO: 168 - DNA, 677 bp, Homo sapien
tttcacaattaaccaacatgcaaaaattctcagactaaacactgagaaattcttcatacaatgcatttgccaccttattgcatttttaaaatctttattctatagtgaattggtattcccaatctgcctaagcaaaggcatgcccttctaacaagatttgcttagagcagaggtgatagaaggaagaatccgaagaccctctggcatggcaatctgggagcagcacattgttgatggagtccaagtgagcacatttcacacaattcatttagtgacaagtgggcttgctcccttttcatccaggaaaaaaactactcacagaccactgcccagaatctggaataagaaccctcattttaaggtattcttcccaacaaataaatatctaaatattgaaagggggcatatcagaaaacttaaaagacacaataaccaaaaccaaaaccctcttcaaaacaagtaagcaatgtctgtatttagttcactctaaaacattcttagcttttcttgcagtttgttcctaaaagatttgattgggcacaagaggaacgaaattattaataaaataaaagcttatttttgtttttgctgtggataatcggtacaaaacgtttccagatctgagacttaaatggatcttttaaggtgaaaaggagaatgccaggttctactgaaat

SEQ ID NO: 169 - DNA, 635 bp, Homo sapien
ttaagaagactgggcatttatactctctcttgctagtcagcctggagcaagcttggagcagacgcacatttttgtactggcacatattcttagacgaccaattatagtttatggagtaaaatattacaagagtttccggggagaaactttaggatatactcggtttcaaggtgtttatctgcctttgttgtgggaacagagtttttgttggaaaagtccgattgctctgggttatacgaggggccacttctctgctttggttgccatggaaaatgatggctatggcaaccgaggtgctggtgctaatctcaataccgatgatgatgtcaccatcacatttttgcctctggttgacagtgaaaggaagctactccatgtgcacttcctttctgctcaggagctaggtaatgaggaacagcaagaaaaactgctcagggagtggctggactgctgtgtgacggaggggggagttctggttgccatgcagaaagagttctcggcgggcgaaatcaccccctggtcactcacatggtacaaaaatggctttgacccgctaccgacagatccggccgggtacatccctgtctgatggagaggaagatgaggatgatgaagatgaatgaaaaaaaaaaaaa

SEQ ID NO: 170 - DNA, 533 bp, Homo sapien
ctgtgatctcacaagtgtgaaaaatcttatgaatgtaaaatgtgtggagattcttctttgtttttagcttccactttgggaacatgtcaaagcacacattgagaagtcccatgagtgaaagagatgttggaaagcccttgaacttggtcgttaggaaacatccacactgaagaggaacctgactgtatggaaggtcaaaaaggctgtattaatttacatgcaaaaagtcacactagaggaatgccatatcagaatgcttttggtaaatatacatgttttaaagaggttatatatcattaataaaaatatctagctggtctgaagaccctgagttatctcaattgttcacggttacagatggaactctttattattgaggagttccactctttcccccatttgtcactactacacttccctagtctttaaaacaattttaggctgggtgcagtggctcattcctgtaatcccagcactttgaaaggccgaagcgagtggatcatttgaggtcaggagttcgagaccagcctgga

SEQ ID NO: 171 - DNA, 568 bp, Homo sapien
cccttgscaaactttcccttaagtattgcactacaagtctaagacacttttcactcaaagttccttccttccttacctctcttttaacttggagtcagactttcatcagtctgacaacttctccctgtctccttccttttccccccttcacaagcatttcacctaacaaatttcttatgtgcttaatcccctcttagaagcagatgccaagatgggattaagcacataagaggtcctggactaatacaatgacaaaggctccccttgaagcatcacactaaaaggaaaaaaaaaaaaaaaacctagccattttacattaactatttctaaaatatagtatttgcttccctatttgctaaaacaaaatatactaaacatgactattccaaaaatctgtagggtactaagaatatgaagagattcactctacttcaggggatggagttgtagtagaaaaggctttgtggagggagggtggtgtttgaaatgtactttaaaagccatcctcaaagcctcgagggctatacctggcctggtgattatccaaggacagtccattcaaacaggg

SEQ ID NO: 172 - DNA, 167 bp, Homo sapien
ccatttacaggaatcagccacttcagttcagacagctttattaaaccgcctggagcgaattttcgaagcatgttttccttccatacttgtccctgatgctgaagaggaagttacttccctgaggcacttgctggaaacaagcactttgccaataaaaacgagagagg

SEQ ID NO: 173 - DNA, 391 bp, Homo sapien
cctcccaaagtgctgggattacaggcatgamccmccmcgccctgatgatagacacgtttttaacttctaaaaatatatgatcatgattgtgtctgtggagacttgcacatatactaaattttaamcaattagagatatttgttcattaccacattttgggagtcattatttcctctatgaagagagaaaggaatttgatacaagttcacaggggcttccagtagattgagacttttatttctagctgagctgctgatgtatgaattttttttgktattatgactttcatatgtattaaaaataaaatgaaaaaacaagggattaggtgaggaacctatacgtctctaatatgcaaaataccacagaaataatgactgktgggaaaattagg

SEQ ID NO: 174 - DNA, 474 bp, Homo sapien
gaactcagagagaggattgtcacccttggcatctgagctgacactataaggacaatgaggagtctccttggggatagatggggagatggaaggacgatgcctgtcctacggggtcttggaaggttagggatacacactgtgagctgccacaggctcaacagtacggatagggggtgctggaaccagccagggctctgatcaccaagctatgtgccccatgcagaggaaggggtagtggcacactgaaccacccagccacaaggctatctccccatacagggcacctttaaaaaaattatccttacaggggaagacggggaggaaggatgaactgtgtgcggtgatgttgcagtgagtgtgagtttgtgtccgtccgcttgtatgagggcctaccttttactaactagcccccaactttcattatctcccctttttctgtctacccttctgcctttttaaagtggcttgcaatcc

SEQ ID NO: 175 - DNA, 655 bp, Homo sapien
ccttgcaggggtggggatgtgtgggcttgttcactgttacagcccatgtatacctgaagggcaacatgtacccacaaatgttccaggaggtaaataaaaaatacaattcagcctcttctaaaccatccttgttgatatctctgctacttccgaaagttaattcgttatttggactccataatttttcctattaattcaccctatgtccaactccaacagtgaaaaaaatttatttaatctttgcaataagcctataggcaggcagcattatcctcagtctgcagataagctaaggctcagagaagcttgtatactgtcacttaggtagtaattgcaagagctggcattcagacccagactgtgggactcctcactccattctctttccccccactaggctgctccttaaaatacaatggatgcttgatgaacgcttgtgggaatcctgggtggacacagttccttttcggccaaaagcaccttgacgacttgtgaagaattaatctggaaaacttaacctatttataaaaacgtgttattaagggcaggttattcccaccccctttaccaaagaaacccgccctgacctttttttactgggggttggtcttgggcattttcaacaaggggggaacagtttaaaaattcccccctt

SEQ ID NO: 176 - DNA, 660 bp, Homo sapien
cctggtcaaagtgggcattaccattcaagcattactagacatcaccgtaacgaaggctctgttcacatgaaactaccccttctccattgggggctcagactctgctctcatccaggatcctgaactctgctccaggcacctgttcaaccctctctcccacccactgcctgtcacttcactgactccagttacattgaaacaattttcagtctaagggaggattttctacctttcagagctgacctccgactttaagacttgacaggtatttatcttgaaaccagagagggagctggaggaaaaaaaaactgagcaagcacatcaatgccttttccacccttcttcatcctttccacactcaccgactgccattaccaaaacgccaagcacaaccggtttggaacaagacgcattccgttttaattaaaaccaactcattatgtattttagtgggggggaaggggggcacaatcagggttttcaccaccaaattttccacacggtttctgaacaccattgccttttaaaaaactatttttccacctccaaaatatttatttaaattttatttattacggaggtggtattcttcctttgggagccaaattgggaaatttagggaaccttttttattacccggttttttgggcgggtaaaccc

SEQ ID NO: 177 - DNA, 459 bp, Homo sapien
ctttttctcttcctctgtggaatggtgaaagagagatgccgtgktttgaagagtaagatgatgaaatgawtttttaattcaagaamcattcagaamcataggaattaaaacttagagaaatgatctaatttccctgttcacacaaactttactctttaatctgatgattggatattttattttagtgaaacatcatcttgttagctaactttaaaaaatggatgtagaatgattaaaggttggtatgatttttttttaatgtatcagyttgaacctagaatattgaattaaaatgctgkctcagtattttaaaagcaaaaaagggaatggaggaaaattgcatcttagaccatttttatatgcagtgtacaatttgctgggctagaaatgagataaagattatttatttttgktcatgycttgkacttttctattaaaatcattttacgaaaaaaaaaa

SEQ ID NO: 178 - DNA, 720 bp, Homo sapien
ctgcaagctcccactccttccatttatcttaacgcccaggctgacttctaagctgcttttcactttcctacctccactgcattttcgcccctgataatttttgtaagcttacctaagcctcccttcttttgagatccccttcttaaaagggtccattctattaaccctaccccatatccagttacttttactacctgctgatctatcgctaccttgtccaattcatgggaattacagggtgcactgggacaagagtaaaatgatccaacaaacataatgttgcatttaaaaaaataagctaaaagatactgatgactttttataactacaacatattcgtttgtgaataagaacatatatagtaaaaagatgaaaatgtgaacaggttgactatttcctaaatttatggcagaaggttgttctggagaggatgggaagaaaaaatgaaggctggcagtgatgggtggggaaatgcaacctccaaaattatctatctatatatttttattaaaaacacccacagtaattatggcaaatgttaatggtttgtttgttctaaggttttggatacatttaagatctcttgctttctgggtaccatttcttttcttttcttttctttttttttcaaattaattccaaaagacttatatctgctacatgaagaacgaagcaagttcagctctcttggctgaaatgttcaaatgcttgagggcaagg

SEQ ID NO: 179 - DNA, 427 bp, Homo sapien
ctgtgaatctgtctggttctgaacttattttttagttattggcaatctttgtattactatttcaatctcttcctggtttaatctaggagggttgtatatttccaggaatttatccatctcttgtaagttttctagtttatgcacataaacgtgttcatagtagccttgaataatcttttgtatttctgtgatatcagttgtaatatctcccatttcatttctaattgagcttatttgaaacttctctcttcttggttaatcttgctaatggtctatcagttttatttatcttttcaaagaaccagctttttgtttcatttatcttttgtattgtttttgtttgtctcaatttcatttagttctgctctgatcttcgttatttcttttcttctcctgggtttgggtttagattgttcttggtttctct

SEQ ID NO: 180 - DNA, 728 bp, Homo sapien
caaacacaaaagtcactgtgtgtgtgatgcttctccaattccactcatcctggctgccattcatgcactagtgcatgtatgcatttttacattttttaaattacaaaaatcaacctattataactgcttagatatatatgaagtaaaaatgaaagttctccctttacatgacccatcccccatcatttccctctttatcttatactgtcagcattcccagcttgtagcacagtgtctggcaatagtaaatcctcaaaaaatgatcaatgaataatttaataatgattaataaataaattaatgatgatggtgaagataaattttagcatttattgaacgctaactacaaaccagggagtgtggtaaatattttataaaaatcaatgaatgagctaaaatgccattctattatttttttggatacggtttaatattttactcataaatatgcttaaagaatattataattatatgacttagaatggtaaaacaatatgtacagcagtatcctattttttagaataaaaatataaatatgtgctcacatatgtggttggggcatgcctagaaacccgattagaacgggattttttcttaccaccattttttttacctgggaaaaatatgggaaaattttatttcccttctttttggttctaaaatttatatacaggagcctatttggctttggataaatcattttaaaaaaggtggtttaaaaaaaaaaa

SEQ ID NO: 181 - DNA, 546 bp, Homo sapien
acaatcctttggaagacactactgggctttgggtgctgctttttaataattgagttattttgagcttgccaagtaggatctattgcctggactaaaatttatttcctaatcttctgatgaccaagaaaggaaaaattaagtttgcagatgggagatgaaatatagccagcgaatatgcatactggttctgaatgaaaggaattaacttttcagtcaagaaacagtctgcatgccgtaaattgaatttttcctgcaactggaatgattggttaattctttttgaacactggcctttctccccaagaacactaatgaattgctaatattttttaaagaaaactggttttttaattaggtaagctccacttcctcttattttttaatccctaaagaaaactgttaaaagggaatggatctatcacgccttttcttttaaaaccacctttttaaaaaaggatttttccaacccccaatttgctcttattttaaaattttgaacgccaaaagaagggaaataaaaatttttcccttaattttaccccctta

SEQ ID NO: 182 - DNA, 333 bp, Homo sapien
ggccactctgactgggtctgctaattcacatgctctttgtgacatacggctctaagaggcagaggctggaagagaagtatgtgggttgtgggatcaagatacccaagtttcagtcttgacactgctattacttagtcaggtgaccactgtaacttcatcttgattgagcctcagatgtctcacctgcaaaatggagtttgaaatttgctatggttgggtgtcacacggattaaatgaaataatgcctgttaagcgcctatccagcacttaataagatggccactgcatcataatgctttgggcacaagtaacacaacatccaacccaaagggg

SEQ ID NO: 183 - DNA, 393 bp, Homo sapien
ctgaatttcttgggctttatgtggcagtgtggtaaaaatatatgatcagatttcactgttaagaaaattctttcagcaatacatgtagagtcaagtttcttgcatggataactgaacatgtgggttatgagattttaaaaaatgtctcgtgacaaactttacggaaatgcaacaatctggacatctagttttgtctgagagtggcgtggatatgaagaactgtgctgttggtgctgatgccacactaagttttggcagtcacactcttggttcttcatatttgaggagatgggatggtgaggaggcctgttggctttattttattacgtgccaccatctagaatacagattcttggatatttcatcttcacaaaggtgaagctgcaaactcag

SEQ ID NO: 184 - DNA, 700 bp, Homo sapien
  misc_feature (1)...(700): n = A,T,C or G
ccaggscawtgaggaaaagrgaaagaatwtarrggstwttcaaataggaaaaraggaagtccaaattggtcccntgttkgccagataaccatgattgkgkatttagaaamccccatgwtytcagcccaaaatctccttaagctgattaagcamcttcagtaaaktctcaggataaaaaatcaatgtgcaaaawtcacaagcrttcctatmcgamcaatamcagmcaaacagagccaawtcatgagtgractcttattcacaattgctagtaagagaagaaaatmcctaggaatacaacttmcaagggatgtgaaggwtctcttcaaagaagaactacaarccrctgctcaaggaaataagagaggmcmcaagtaaatgggaaaagcattctatgctcatggataggaagaatcaatcccgtgaaaatggkgatactgcccaaaataatttatagattcaatgctatccccatcaagctaccattgactttcttcmcggaattnggaaaaatctactttacacttyatagggraccaaaaaagaagcccwtgtagccaagacaatcctaggcaaaaaagaccaamcctggaggcatcacagtmcytgacttcmaactatwctaccaaggnytmcrgkgmccaaaacagcacggkacntggtmccaaaccrgacwtwtwgaccmmcagacacagaacmgagg

SEQ ID NO: 185 - DNA, 192 bp, Homo sapien
ccagyctttcttttaagtaagcgctttttcaagctcattgtagctacaaagtcaataaattggtctttgttatttttacctgaaaaggctgttaaaggttaaaatgacaaactcaaattcaaagggattggaggatttggtgtttatgatttctcagaacaacaatctagagaccaccagggtgggtttcag

SEQ ID NO: 186 - DNA, 688 bp, Homo sapien
gtgctggaattcgcccttagcgtggtcgcggccgaggtgggatatttcttctggatagatttcagataggtagttccctcaaataagattatatgggtttgcattttcaaggcagagttgtatacttcctgctctttatttaaataaaaaaacttgaaaatctgttctgcccagtattgtaagcgctcaggtacaaatatgaatgaaacaatctctgcctaagtaacacaagtatagggacaagattctcagtaaaattctcacgtgaaatttgtaactcactagacactatcaggagatcaataattatgtaattaaaaaaaataattacctgccaaactgggttcttctttggcacttctgcttggttttaagacaattctcacatagaagcttattattccccattagtcattccatagatgtaaaactggtagaaacaggacttgaattgaacattctttacaagtaagttatatagcttctgaaaaaagggcttgaaaaagcatttttggggactataagaaccttcaaatgctttcccctcttaacaaaccttaaaattattttgaaaataatttaagggggctgattttctcttgtcaaaatcttgaaccccacttaccaggtggttggtcaaaccaaagttcaaaaaaaagcttctggcctttcctttatcccacttgca

SEQ ID NO: 187 - DNA, 779 bp, Homo sapien
gcaaaaaacagatacattttcagtgtttaaaaatgaacaagtatggaaaggcttatacagtaactgaaaagtctcctttgggaagccaaggtgggaggattgcttgaggtcaggagttcaagaccagcccaagcaacatggcgagaccccatctctacaaaaaattaaaaaatcagccaggcatggcggacatacttgtagtagtaactacatgggaggctgaggcgggaggatcacttgagtccgagagtttgaggctgcagtgagccgcaacgcgccctgtactccagcctgggcaacagagcaagatgctgctctaaaagaaattttcttttaaagaaaaaagtctccctcatagcctgttctacaaaagtcctatttcttcccacaaaaagcctctggtacctggtgttagttcttggggtggaagattacttttaaaaatagaactattttttaagtatatcttttagggaactttagttcccgaagctttaggaaatgggatcttgaaaacaaaagggatttcaatacctatgacaatgcttaaagaattattggggcatttatttttcaatggagggtccacaaatctttggaaacccttggccaattaccagaagccactttaatttttgaccgaaaatgtttttaaaaattggcttttggaaaaactgtctctttccccaaaaatgaaaaccttgaaaaaaaggggaatttttaaggttgccccctcattaaattttaacccctctgaaagaaaaccctcttgtgacagg

SEQ ID NO: 188 - DNA, 394 bp, Homo sapien
  misc_feature (1)...(394): n = A,T,C or G
ggcgamgtctggycaccatcatgccctttaatcaactcacacctgtttaaagagtgtttctgatttgaccttcatcccttagtttactggcgttaaaaaaagtctcagcaattttcattatttctcgtgggtctcattatcaaacctttacttatttcggcatatttcctctgggcttcttctagtttctgccttacaagcaatgctgttctgtaaatttattgaaacctctggaacatttcacctttagagatggaggatggaaggattggyaccagaagagggctaagatacgttytctgtcttngagctgaaagcacagyctactctccttcgttttgycgatgagaaaagttgaggccagaagggaggtgacatgtttagagtcacccag

SEQ ID NO: 189 - DNA, 681 bp, Homo sapien
aagttctgactttggtctataaaacagggttattggctgtggctgcactcaatatctaaaaagttattaggaagtgcctcgttattgtcattaaagatatctaaatatggtagaccaaaggttgttgagaaacacatattatggactgagttctgtttcttctgctgtggcgcacctaagctcaagccttccttctctccctccccttctggccggcatggtatctgagctcacagacagacaaggcatgttagaatcatcagatcatgagcaccgtgctgggatttagccctctccaaagtcaattcttacagtccatactttgcttaaatcctcagttgttgaggtctgctctgctgtcagtaatcccagctataaatttcccccaaatgtggggcctagataaagtagaaggtggatggactcagcttattttcatgggatgacaggaactggaaagagaaagggcattgaaaataaaaagttattccagaatagcattaaccctcttactgttcaagaattaagaaagcctacttagaaatgagggccttgagaatgatacccaaatattggtctttctaccaaaaaatggcctttccaaatatctgctttcctgttccccaattggctttttaagtagaattaagttacctaaaactttacctgaagggtggtttt

SEQ ID NO: 190 - DNA, 839 bp, Homo sapien
caaatacatgatttccattggcatagactcttctatagtctctcaggcacaccttatgactaataagaacactgtcttctagatataagccaagttttaggagttatctttgtagtttctgtgttgagactatgggtcttccctgtgcaaagacttgattagcaaatactatttgaaacgatcccaaattcatagtgcagttgaccacccttctgatcaaggggatctctgtatatcccatgaaagcttcataggtctcaccctagattaagtgcttcacttctcaagacagtgaacagatggaagacttttgtagttatcattatacaactgtgccctgtgtgttttattatacaaccagagaactgaggcactggctttacctgtcagctacgccaggggtgtgacgtcatctttctgacttgatcacacatgccacattgcttaatatttcaagcttagactgaaataatcctgtggtaaaaaatttttggggggctggggaggtaaagaacaagggggggaactttggaatatttttattcattaatcatatttcccgaattgtattttattttgaaatgaccataagggacttaaatacgtattgtggttaaattaaatggacccaaatggaggtaagtaaacctaatgggacaaatgaataaaaggtttatgactgggagcatttacccatgaacctccttagaagctatttaacctttcttttggaaagccctgaaggctgggaacttaaattttaaagacagtacctatttccagaatcgcttccaaatggccatgttttaaagggccaacattttgggatggccctgccc

SEQ ID NO: 191 - DNA, 697 bp, Homo sapien
ccatcctgaatactgattttctaatggaactctattcaatggcgattgtaaaaccctgaggctccgttactattatggagcatactttcatctcattctcggctattgggcaatatgtatctcataagattttatcacatttcacagatgaactgttaattgattccatgggtacgattaggcgagatccaagctggagctgcagctctgagtcccataaattctttgtgcttctgtaaagaataaatctgtttttaatgcaaattaaaactactggcagggaattttggctcccagttattaaaagactggaaatgtgtaagtggagaaaggcaataactgcagtaatctcttaccggactctattataattccaaacatacataatggtgagaaaaaccgggaagggaagaatgtggcaatgtccactctttgccccaaacataacccttaatttccatggcgggcccaaacactggtaaaaaccaaaatggtaccctctatagcatgcaacttttatttcactccaaacgaaaaattattttgactatggcttgggaaatccattagtagaagaagttttataacctataggaacccggccatttcatttctaccaaatcacaggaattttagaatgggcaaggaatttacaggaagacttgcccaattatctttttttgggggactaaaccaa

SEQ ID NO: 192 - DNA, 687 bp, Homo sapien
ctggttactatagctttgtagtataatttaaagtcaggtaatgtgattcttccagttttgttatttctgcttaggatagctttggctattctggatcgtttgtggttccatataaattttaggatagttttttgctatttctgtgaagagtgtcattggtactttgatagggattgcattgaatctgaagattgctttgggtagtatgaacattttaacaatattgattcttccgattaatgaacatggaatgtttttcctttatttggcgctctctttaatttccttcatcagtggtttataggtttcattatagagatctttccttcttttgggtaattcctacgtatttaatttatgtatcgctattgctaaatggaatgactttttaaatttctttttcacattgctcctggtggcatattaaaagctactgatggatggtgattttggattctgccactttactggaattggtggatcagttctaatcgttttcttatgcacccctttacggtttctacatgtaagaatatatcaccttcaaacacggataatttgacttcttccccatccaattgggaggccctttatatcttctcttggcctgaaggctctacttaaaacttcttatccctttgttggaataacagtggggacaaatggacatcccttgtcatggtccca

SEQ ID NO: 193 - DNA, 493 bp, Homo sapien
ctgctaaaatgatgttgctaaagcattcctttttcttttgattaaacttcatgtttacaaaaaaattaattctagcagaataacgaatggttttgttttctagttctctgctgaatgaacagttttgccaattatcttcatagagtagtgatataatgaatgcaacctcaaatgcaaaccaaccaattcacagtccataccccaatcacttccttcatcagcctcaaaaatcgctaagtgaaccagtagaatggttttggagcagtaataggaaagcaaatagaaagtcaagggggactttcaacgccaacaagaccaattcagatcctgatctgactggtttctaatacaatctctttccagagtaatggagcatgagtctgccacacagaactttagagagagtcctttatttcaaagactgtaaagttggaagaattcattcatctgcaaagtcaaatgtcaaaagttgtgcttcccactcctcatcagg

SEQ ID NO: 194 - DNA, 424 bp, Homo sapien
  misc_feature (1)...(424): n = A,T,C or G
cyagggcanttnagcangasaaggaaatanmggggattcaattagggaacwraggakarwcaagttgtccstgtmtgcagatgmsgtgattgtatatctagamcaccccattgtctcagcccaaaatctccytaagttgataagcawcttcagcarmgtctcasgatscracmtcwatnsgcraaantcacmwgcattcttatacaccaatawcagacaaacagagagccaaatcatgagtgaactcccattcacaattgctacnmaagagaataaaatacctaggaatccaacatacaagggatgtgaaggacctcttcaaggagaactacmaaccactgctcaaggaaataaaagaggatmcaamcaaatggaagaacattccatgctcatgggtaggaagaatcaatatccgkgaaaatgg

SEQ ID NO: 195 - DNA, 229 bp, Homo sapien
  misc_feature (1)...(229): n = A,T,C or G
tgaacacccttnggaaggaacctgctcgnatgtannanaaanggaccggacagtctgctaaaatcgccctctttagacgcggcgcgccggggcagagtttttctctggtgctttgacctgtatttggtttaatggttttgtcctaatctcttcaatcaataaaattgtgcgtatttaactaaaaaaaaaaaaaaaaaaaaaaaaaaaaaaaaaaaaaaaaaaaaaaaaa

SEQ ID NO: 196 - DNA, 557 bp, Homo sapien
gcggtggctcatgcctgtaatcccaccactttgggaggctgaggtgggcagatcacttcaagttgagagtttgagaccagcctgggcaacataacaaagtgagatcttatctctacaaaaaaattaaacaaacaaaaaaacaaatcaacattcatttgcagggctctttggtcttcttaaagaacaaacatatgaaataaataagctgattcttaaagataacaaatataatgagctttctcaactgtaaaagcatctctaagttgttctatcaatgcatatccactccatgaactaacctgaagaaagtgttgaccattctacccaattaactgtaaactaagattgctttaatggtttgcctaaatttgagtacctttaaatttttgctttttatccaaattcattctcccttcttcaaattaaatagttttgttagaaatcggataagcaagatgtactttttagaaagggcaatagaatcctacaacatgctagaatttgaaatgtttttttaaatcagtmmtttctctatgctagtaactaagaaaattata

SEQ ID NO: 197 - DNA, 624 bp, Homo sapien
ttttactacctatatttaaaatgatccctgacgcccctcaagacaaatatattaatttttttactttgtgggatagagatcagaaaaagagtagagatgaaaatactggagaaacaatgcaggagatatttatgaggtgagaatgtcaagaaacttgtaaagggagaatactataatgacccctgaagagagagctttagaccagttgagtattagaggttgccacgtggctattcatccactaataaatacaagaaattactaaaatggaagccactggaaatatgttttgaggaaggtgagaatgtggacctattataaatgggtgaatatgatttctttctcattaagttcataaataactttcagacatgtaacagtttatgaagtgtgccgtagtcatttagtataagttttatacacaaaagtgtttttactaagactgtcacaggttcttttgtgaatcttgtttgtttttcctcattgtaaatactgcaatagaacatttgtgtcttaacataaggcaataaatgaccttaagaaccttcacttttatatagaaagtggaggaaaagttggcagagtaatttgttgattatagataaaagctcttgtagaaattgg

SEQ ID NO: 198 - DNA, 175 bp, Homo sapien
ttttttttttttttttttttctaacacttatgcatttattttcatgtgtaagaagaaaaacgtaactagcacgtgaacatgactgcatggatacacggctcagcacgaggctaaagtcagaagtgagtgaaagcaaaaccgcatgttgatttaagtgaaataacagaacagaaaa

SEQ ID NO: 199 - DNA, 871 bp, Homo sapien
ctgttgatcaatgatgagctcccaagagtaaccagcctctatatagtcagcatcactggtttctcaggaaaagcatcaccattgttcatcttgctgcaaaatgtatgcacaagtatctttttatttttaaaaaagccctgacattttatgactgctgcttttctaagatattttcaaatatacagtccatacggttcagacacaatggactggggatagagacggctatagtgccgataatggagaaactagccagagcttcagatatttgttttccaggacatctcaataattgggtacacctcacaatatgtgagacttgacgtcgagtggcacggcatactctggcgcaggcacttgataaagactgtgtttgcaaatacttagcctgcacttcaagataccaggcatctaagcacgtcccagatggtgacagttaatcttcaaaaaaccctatgtggaagtattatcattgtcctcattttacagatgaggaaaaagagacacagggatgtcaatatcttcctcaaggtcacacagcaagtaagtgatggaacagtggctcagccatgaagctattgctgttaaccactaggttgatttgccttcattaatttcttcctaaaactgcacatttcccgttagtccctctttttggtctgtcgtttgactcttggctactgcttagaggaagattcattctattattttctaacttagtaaatatgtgcaactccttggggacatgaccaggcaaaagctggatacagaaatgtatgcccaaacaccatcccaagttacccctaacaggtcttttctggaccctgtttgtaaggggggtatatttggaaaaatttttaaaattttctgg

SEQ ID NO: 200 - DNA, 737 bp, Homo sapien
gacattttgaaggtaacagcaatatctgtgtatagatggggttgtggttttgttatttatctgctattgctgaactatcctttgtcttgagcgataaaagagaagtaaaatactaaagaactgaactgtccatttctggaccatgagtaaagatgctggctgtcaaacttcctgttcatacattagtttatttatagagtgtactctctatgtaaggtattgactgataatgttactttgacttcagatagcttgcagtttaatggaggaagaagacaaacatgcaaataactaggtcaatgaggcatcctttgtgttccattggaagctaggctgctttgtaaccttgttaatttctgtggttttggagtgcattcattagcaaatacaccccttgttcttatccattctctgcttttttctttatttggcatttgatgacattttttcatgtggggaaattgagtcaggtgaggtggaaagaaaataaggacacgacactaaattctttgatgtttttccttaaaaaattgtttttcaagtgctccataaagggttgtgaagttttaagagccataggacttggattattgtgaaagagtgtctctagggggccaggttaaaccatttcaaggactctccttctctcatctcccttgttccacccagggtggcgacccccaaaaagcacaaagcctccctttcttcatgggaagggtaaggaacggaagggaacc

SEQ ID NO: 201 - DNA, 493 bp, Homo sapien
tctagaaatgcagcttttatttattaccccatttctttcaagtccttggaaaataacatattaagggtacaagaaattaacacatgatggaaaagtcattgtgacgccaatgaatttcattgagtataaactcatctacttcaaatttattttataacacaacctaagatactcaagataattatttaatggttagctcttaagttgaattggtctacataatgcgtgggaagaaaaccagatttttagccttcttgccaaatccagacctctggttgatttttctttgacagaagatgcaagttattttccaatttcacaattaaatgtatttaacatgaacattattttgctttaaaaactataaacattgtaggagaattatagccagtcttcagttataaccactccaccctcctcactttctctctctctctctcttttttttttgctatgggatttaatgggaaaaatatgtaaaaactgtcactaa

SEQ ID NO: 202 - DNA, 283 bp, Homo sapien
cctttttatctcagtgacaccgtccggggacgcaggtggtggtgactcaaggctagcctcaaagggcagccccacctcctcatcctggaccacagagaccacctgcttggcgcgccgtcgcttttccgagagggtggctgactccggggtgctggggctggggctgccgcccccgccgctgttgctgtactcctcgccccagtcgatgggggctgccctcggacagcaggtgcaggttgggggcactgttacgcaagaccatgctgcccggagaggtagatct

SEQ ID NO: 203 - DNA, 713 bp, Homo sapien
ctgcttttgcgcaaggtgccactggacgagcgcatcgtcttctcggggaacctcttccagcaccaggaggacagcaagaagtggagaaaccgcttcagcctcgtgccccacaactacgggctggtgctctacgaaaacaaagcggcctatgagcggcaggtcccaccacgagccgtcatcaacagtgcaggctacaaaatcctcacgtccgtggaccaatacctggagctcattggcaactccttaccagggaccacggcaaagtcgggcagtgcccccatcctcaagtgccccacacagttcccgctcatcctctggcatccttatgcgcgtcactactacttctgcatgatgacagaagccgagcaggacaagtggcaggctgtgctgcaggactgcatccggcactgcaacaatggaatccctgaggactccaaggtagagggccctgcgttcacagatgccatccgcatgtaccgacagtccaaggagctgtacggcacctgggagatgctgtgtgggaacgaggtgcagatcctgagcaacctggtgatggaggagctgggccctgagctgaaggcagagctcggcccgcggctgaaggggaaacccgcaggagcggcaccgcaggtggatccagatcttcggacgccgtgtaccacatggtgtacgagcaggccaaaggcgcgccttcgaaggagggggctgtccaa

SEQ ID NO: 204 - DNA, 275 bp, Homo sapien
gtagacaagtacagcagatccagacaccagatctagctaggctaaatgtacagtatctaacttgatctgaactgaacctgtattccttgatgatgcctaaaactacatccatagaattctggtgaacctgtaatacagttctgaaagtacagttttatataataagatgctgatctctttattctttcaagtaagagtgctagagaacaaattgtgttacttgccttgggatttattgaacgtctggaaaatgctgtcttcctagatccaaacag

SEQ ID NO: 205 - DNA, 694 bp, Homo sapien
ctgttcctgtacatttaactgaaaaaaaagtaacttaaaataatataaaaatagcactcatgtatgtcctacagttataggtgaaatttgatattgtttgtcttacatagcatacctatagacagcttaagtaaagtgactgttaagagggttatgcttattgatgaactcttgtagttgcttaccagctctgttagtatagttaaattgatctcagtagcttcaagtatttataaaatggttgaagtccaaatacatgtgataattacaatacactttgaattaatggagggtgggaggctagttgaaatgcattttatttacccaaggagtatgttaaaatgatagttataaatgttggaagtttaaagcaagatactcagtttagttctttacaaatcataagaagaacaaaattagatgttgacattgctattttaggctgtgtgttttccatatgcttcttgctttccctgtcacaggtggtggcagcaatattggtgtgattgaggttatgctggcaccactcgcacacaggcgcacaatggtgttagctgggcagaaagagtggcatctctggctaccgggctgggggcgacctttaccataggatgaagtaaccttgcattcggctgcaaggtgtactgtaccgtacacaggtgctgggtcgatggccactttctgcttttctttc

SEQ ID NO: 206 - DNA, 704 bp, Homo sapien
  misc_feature (1)...(704): n = A,T,C or G
tttttttttggnaaaaacagggtttcatcatgtttgccaggctagtctcaaactgctgacctcaggggatttgcccgcctcacccaattcaactttcgtaagtcagtatttaccatctaactcagtgtcccaaaatttaaaatttccttgcactttacagcaaaaatacatattggggctctactgaagcaatatatacatgtcaaaactaaaaatcagaaaagcaaaagggtccattcaacatatagcagcttatatttaaatatgtacaggtatgtatgttttcacagttagatctttaaaaaaatttatatttgatatgttcaaaaatacttctattggctataaataatattttaaaagctcaactgatcaaaatgcattccaagaacatatcaaattaaataaatcttctacgtctttaaaaacagataattgaagtcagtaaagcttgaggtttgtgttaagtgtattctgtcagtccctactactagggaaggcagaatcttctaaatacgatacgaaagaaactcccaaagcttggaaggaatcggcagctcctgaactttttggggggggcatccctcttcgggattgacatgcgacataaatgttgcaagctaagggaccccccccgggggagtgggccccaaaaaaaaccacaccttccccgtcaatggtggtccccccaccaaccttaaaaa

SEQ ID NO: 207 - DNA, 225 bp, Homo sapien
ccattttaactgtactgccaatagaattctggaattgtggaaaattgtatcattgaagttcagtaggatgtgtggcttaaaaatttatcaggaccacaaaaaagaaaacaaaaatatttggtactgaggttcattgccagggcaggaggtatttccagaaaatactcatgcctgtgttctgttccttgctttcccaaatactgcatgtgactttcctaagcggca

SEQ ID NO: 208 - DNA, 678 bp, Homo sapien
  misc_feature (1)...(678): n = A,T,C or G
cctatatctatcaaaaaaaatccagttcctaactaataatctcccaaaaagaaagcaccaggaccagatgatataaatggcaaattttttcaatcatttaaggacaaaataataccaattctgtatcatttcttccagaacacttcctaactcatcgtatgaggccagcatcactctaatagcaaaaccagataaagccattacaagagagagtgacagaccaatgtggttttattgaggatgcaaacaaaatttaacataatatttaatagtgaaaaactggatgctctttccctaagttagagattaaggaaagaatgtccccttcactactcccatacaacaccttactgaaaattctagctagctttataaaataaanaaaaaccanaaaataaaataaaaggtgtacagactggaagatacagtgaaggaggaagaaataaaattttctttgcgcataacatgattcttctatgtggaaatcacagagatttgaacattttttttttttgagacagtttttgctcttgttgcccaggttggagtgtaatggcgcgatctcggctcactgcaaccttcacctcccgaattcaaggtgattctcctgccctcagccttcccggagtaagcttggggattaacagggcatggcaccccccatgcccccagctaaat

SEQ ID NO: 209 - DNA, 720 bp, Homo sapien
  misc_feature (1)...(720): n = A,T,C or G
attattttgaaccctagcatttagaaatgaaaaactttttataacaatcaaatacatgataaagtatgcaaagagtaggaaattattctgatgacatatggagggttacaaaggagaaaactttttgctacctctgataaagaatagactaaattctccaagaccaatctgactggtgtcataataaaaggaggtacacacggaagcacaagggatgtgtgcctctggaggaaaggtcaggtgaggactcagtgagaagacaagccaaggagccaggtcttggaagaagtcaaccctgttgacaccttgatcttggactaaccctgtggacaccttgatcttggacttttagcttccagaactgcnagaaaataaatttttcttgtttaagccacccanagtgtantgttttgttatggcagccctaacaaattaaaattatattttaacagagaatataaaattctaatataacattttacagtaaagcattcatggtcttttttttcttattaataaatccatcaaaacagaaagttttgcaaaattttaacacatttctctaccactactgtttctactctcttaaaactactccgcaaatataaaaatagaaggccaaaatgcatcattaaaacgatgtttggggactaatggccttaaaattctattacacttggaaatatacaaatattcaaagattatctattgatcacctca

SEQ ID NO: 210 - DNA, 277 bp, Homo sapien
tccatgtatttttatacagaatggaacaatatgtatgtatgcaatykttacattccaccatgaaataaaacagtataatgaaaataacaatagattcaaacaatgatatgctatttttttttacctatgacattggcaaggtcttcttaaaaaatctgcgaataaccgatgttggagagatcatggggaaatagccactcaaatgttactcatgagagtgtacatatgtgtaacttcacttggagggcaatttggtgatacatttaaaaagttttgg

SEQ ID NO: 211 - DNA, 715 bp, Homo sapien
gtggtagaaatactaattttgcaattacagaaaaaaacaaatgccattcacatggttyctaacaaaaagtgtctgaccacccccaccccccacccctcaaaaagcccttaaataaagaggaagatcaaaagaaaacaaaataattcccgagtttcacctcatacatacaatatagcacaggaagtggcaaagtttaaaataatgcctttactgttaggactagtatgctgtcaaaagccacaatccttttgttttagtgagttgattttcaatagaaaaatacaaatgaacatgtgtttaagttccaacatggattgagcacctctgaatttagtatcaaatgattaattttatttttcagatgtcaaatcttagtataaaattttccattattttaaacttcacttgaatctttaaaaaagctgtctaaattgtactatatgagttcagtttaatcttctgtaaaatgctaacaaattgaactgtcagcagtcttttaaaaaaaaatgggggctgggttatttctagaagaactctcattaagctttgaaaatcagaaatcagagacaaataacttcagatatagactagctccacaagcaaatttatacaattatctgtaacagtctatacatatatgtgtatatatatataccgtaaccactttcataggtaaaaaatattaacttcatgtcacactatgatcagaagtata

SEQ ID NO: 212 - DNA, 717 bp, Homo sapien
agcctcccccaatgccttaaaaggtcacagtagatctcagctctgaacagaaactcaactgaaactcttcccacaacccagcagtagatatattaaaacctacaattttcagggatacaaccaatatttaattcttttgagggttttgtgtttaatacaaggacacaaacacacgtataaaatgacgatgtcaatactgattaaacagaacaacaaaataagaagctcaaattatcatcagctattgtgtatatctgaaataacaataatgcacttgattctgaaagaatgattagagttcctactctgaaaatctaattgtcttgatgtggcgaagtgagaagaaaggatgatttttctaatgaaaagcatgtatacgggtagccctttgcgagattctgtcaaaaccctgaattttgcattagctgttttaccacccaaacgtttttacccgaggatgtgcagcaatgggaactctcatacactgcttgtgggaatataaatcagtataaccactttggaaaaccatttaacattgtcaactacagctctacacacaagtgctataaccacccattccactccagggtatacaccctaaaaatatgaagtgcccatgtctacccaaaaggccgcctaaaaggaatgcttttgagaagggttaaccttgttaattagtggcaaaactgggaaaacaacccccaaatggtcccatcc

SEQ ID NO: 213 - DNA, 599 bp, Homo sapien
cctgttttggcgaggcaggagggaagcgggatgggagtggtggttaggccaagggtagttcaaagcgattcagcaggatgatgaccacaggagtgctggagccgggcctttcagcccccgtgtggatgatgaccggccatccaggacatgcgagggcttgggacagtggacagccagtgccacacaaggaaggaccgattaaatgacacagttaaaggaatttggcctagggagtgcaagccagaaaggtttggtctttttatatatgtaacattggaaaaaaggaacatctcctgttccctgtattaagttttgactttagctcagcaaatgcagtgtttgtggcagtaaatatactctgataacaatgttctttcccaggaatttagagttttatgatggttattgaaaatgtttacatgacaggctgtcaataatattttttgcctctaaaaataaaacatacataaagtgtacggattttaagtatgcaactcactgaacttttcataccgtaatacaccaccctagtaaccctcccccagttcaagatgtagactgtttccaataacccctcatcctgttccttaatagccccc

SEQ ID NO: 214 - DNA, 789 bp, Homo sapien
ccttatgacaaaccttgctatgccaaggatatgcttcactatcttcatctatcaaaacactatgcatcatagatatctaattttttcatctcttgcatgaagtctttcctgatttccctctgctgaaatttctctcttcaaatgatgtgtttccatagtactttgtcccttttcaaagatatatctcacatcgcatattttaccacagttagtttcatttcttaactctcacactagattacaaagtcaatatagacaaagaaatgttcaaccttatataacctcctctgcctatgctggtaaattgcacctactatgtgttcaataagagcttgtctttttcaatatacaaaactttgtaaagattaaagaccttgtagaaagtcaagaggaagatagcaatttcacttctaagaacttaccctaaggaaacattcatgaagagatacaaggggttatgtgcatggatgttcattatcatattattcttcattatgaagattatgatggtaataatgaaaatgattatcttgtattgggccttatttgaagtcaagcattgagaatgtactttatctgcattatctcactgagttctcgtagcagccctataaggtacagactgttatctaagcttaaaaaaataaagttaatgtccaaggtcaaacaactagtaaaagaagggggctaggaaatttggaaccccaaaaggggcaacctctcaagggctatgaatccttaccattattataaggaagcttggcccatggtggcccaaaaaaaaccggg

SEQ ID NO: 215 - DNA, 765 bp, Homo sapien
ggatgtctgagcaggagagagaccatgtgaaggatggactgaatggagacttgtatcaaagagtctgagtatcaaagacttgtattagagagggttgttgtagtaatctagtcagggtatgagaaatggtttgtattagagtgtcaggagtagtcgtggcaaaaatatatagatcaggatgagggatgggcctcatctcacaccctgactccagtcaatggcagtggctccctggagtacactactataggaaggattttgtaaagttttgtctggcctcagtggagggtgaggtaggggaggagttctatgaacagttagtggtgtctgccatggttgaaacaatggagaagggggacaccttttctgtgcagatgttgcttctggtagatataatccacaatgtaatgggagaagtactaagaatcagtaaattatggagggtgtaaaagactactgatatttaagcctgcggaccggacttagagaaatgatagttaaaggagaaatatccagcaaacaaagatatgacattgaagtttgggactgcgattagtaccagagatttggattggaggtgatttgtatagaatggataggtgattttactcttgcaatttggattgaggggtggggaaaaccagaaaggggctggggggtaaattagtagaaggtcaccttgaattcattgtggtccatatcaatgctgaaactgattggggaactttttactcttgagtccctttgtaagggaaccccagaaag

SEQ ID NO: 216 - DNA, 780 bp, Homo sapien
cctttttctgtggcaaatggaggcttttcactgcctgtagagacaatacagtaagcatagttaaggggtgggtcagaacatgttaagataacttactgtatatgtattcccttgtattttgttaaagctggaacatttgatatttttccatttatttatgaaaaaatatgaacctattttcatttgtacaaggtaattgttttttaaagcaagtcaccttagggtggctttaattgtataagtcaagcacatgtaataaattcaaaacctgcagttaacaggatattagacatcaatcctggtaaccaaatattaaagattctctttaaaaaagactgaacatgtttacaggtttgaattaggctaaaaggtcttgcagtggcttttcatggcccttcaaattggaatggaactactgtactttgccatttttctataaatcagtactttttttttaattttgatatacattgtgtgaaaaaagaaaatggctaataaactgtattaaatcttaaacaatgtataaagattgcacttagccagttcaaagtgtatacttattcataatgaattataacagttatatttctgtgttttcttgtaaatgtttcttttcccttaaatacagataattcatttgtattgcttattttattatgagctacaacaaaaggacttcaggaacaagtaatgtattagtatggttcaagattgttgataggaactgtctcaaaaggatggtggttattttaaatataaatagctaatgggggtggtaaa

SEQ ID NO: 217 - DNA, 810 bp, Homo sapien
cttttaggcagcccggcaccttcatccataggcagagagagaactgggtgttggagacttattcgagggtataggaagggccctgtgaagttgatttaacttttggatgtcagactgtgaaagctcctgagaaacttggggtaataggatcttcttttggggatgaaaatggggaaggcgtgaggacctagactacttctccctaggtcagaaaaagagaattaccccttgacaaatatgatacctgctaggtatttcccagggaaatttagggattggcgtctttccctagcatgtggaggaattggcagacagcttcctaagggcggggagcgggggcccaaggctgacactgcttgcatccacgtgaccttaagttatggcagatgactctgaaacggactgaggccaatgagaacagatggatggagcactcaggttagacttgttccttctcctatgctggaggagagggatggttctctagaatgttggaggtgagttgagagctcgcctcttgaatgttgaacagtgtactcttctgaaaactgcatattcactttatgtggtttcagaatactgggctcaatactaacataagaaagacacttcattgagaaattcttaagcttacagaaaacctatctctttgcacattccacataacccctagcaaaatgcaggttcttcatacttctgtcctttttccattggaagaattgcttaaggaaaaattaattcctatttattcccacaaaaggttgggcattgctttgattttaccccatgggggaatgtgcctttgaattt

SEQ ID NO: 218 - DNA, 817 bp, Homo sapien
ctgctcccttatggaggtctcttcattaataattattggatagatagagaaggtgagcctgtggcttccaagtaccggcttttgctgaaggtctacatgggaagaagagcatcatttgatattcagtagatctgccacacccaactggctccatctcctggaaaacagcactcactacaagcaactgtaatagcacccagcaatgaccacgctgctcctgctggctcttccgtacaccagtaaatgaactcaccaatgtattgcacacatacatttcacagtagtacaataaagccctgtatcaggagtggtaattcaatgacttgactctatagtgcactgcagctttatgtcataccaacattcaaatattcaaatatccttccaatccatttggacaaaaatacaccatggctgccaagacacatgtatttttctttcttccatggactcctaaactgctcccacaatcagcagtgttcttctctcagaaattatcttaagcttctctactcaatgggaggtacacacagagacctgagaatatgcagaggccagaatctctgtctgtgctagagatcaactgtactctgcccacctggggaacacatcctctgggtaaagtactcggaagtaaattacattccctggagacagatacgggctttcactgcagcctgttagaaaacacaatgtctgtaagttacctcataggtcaaagagttttggattatatttttcataatggggctatggcctttttaccctggttttaatacagaaccacctgcagaaaggacattgaaattaaaagcca

SEQ ID NO: 219 - DNA, 661 bp, Homo sapien
ggatgctgaggcaggaggattgagtcctggagtttcaggatacagtgagctatgatcatgccattgcactccagcctgggcaacagagcaagattctgtctctaagaaaaggaaaaagaaaatgaatagatagtggtattagatgttaatgacatcagttgtttttattctttattctttcttagaaacagattagttttctcgaattaaagaactaccatttttcttttttctacaactttcaagagctggtgaagaaatgatgtttagatttaatagatatagtagcagtcatatattaatagaatagaaactgagactctaggaaaaagatagacatgagataaggagtaggcatggtagacatttctagattatttatgaaaatgttgtagaattcatttttttttttggtctgacctttggcaatggtgctgaggaagggaaagccagcccatcaggcaaggctctgttttctgcattttatcccgtttgattcttctcgttaggattggagcaaataatttcaatatgttcttcgctgggtttatcatagtgacccttcatttaaagggacttttaacaattgacttaaagaacactgagatgtgatattttattgggatttgaaagttgccattgggttttaccttccttaatt

SEQ ID NO: 220 - DNA, 792 bp, Homo sapien
  misc_feature (1)...(792): n = A,T,C or G
cctctttttattcctacaaataattttcaagtacacacaattgggtaaacaaagaaacaaagccaccaagaatgaaaatcagtaggaataacgaacaagactcacagatgtcaaacaagtctgtgggtcttgcagacttcagatgttggaattattagtcgtggcaagngnncaaaacattagctattaccattatgtttaccaactagtgaagtgaactatgagaggatatattaaccacagaagttaatagaagaatagactcctgaaaatatctggatgctacaaactaaaatatagtatataatccttcatagagtgtcagtgacttcatatttataattacatttttgtatattagcagtgttctagttcttactgccttatctttaagctgannnnaaataaaattatattttgggattcaaaaacacatagctaatgattactatgtggcagtgttacattactttatcacatatcattaacataatctgcatgtgttcaaagagatcttcatacttctttgtagctcccacttctttgtcgtctttgtagctcccacaacatctagaacagcacaaccgtatatggagaaaactcagtctagtattcgttgaatgactaatggaaaatttagttnataaacagaactttcttcattgnacaaattatcttgcagaagaataatggccttagtttaaaattatcatatttacccatntcnccangttattttatctcttttggctaanaattttgaaaacggtaccttttaccctttggcatttt

SEQ ID NO: 221 - DNA, 759 bp, Homo sapien
  misc_feature (1)...(759): n = A,T,C or G
cttttctgctgctccgggaggtggagtggcctggcagagggcacatggctgccacctgctgcaaggaaaattctcagtgaagactcctcagtatgaaggagataagcctgcacaatcagtcactgatagatgcttagtggaaaaacttccaattcccatttacagctctcagagctaggattaaaaactcctggtcataaactcatgtgatgagaagttatagcacgccctcattttctacatanccacttgcatttatggttggcttttgaacttgctagaagggaaagaagtgcaaatgtgtcctccttagagctactctcctccccttggtgggtttccagtttgtgcattgtccagatggcccaggagctgacgatcaaagggaagaagtcatgtttgtcatgagaatgctttgctgcatcaggattcagtgaagctgttcaccgcctggagcccatgcagcctcaagaggcaggatggagctcagaaaccatcactgaggttagaaagtgagcaccaaagttgagggaagcccacaggagtgagccgaagtgctccctttggatttccaaagtgggtgctgctgcttcttccatcagccttgcttctgaccccaatgcgttcctggtgccttcttcttggcattttgctgtcgggggcccaaggaaaaaaattcctgcatggcagtggtgaaaaaagatggctgcctgctgaaacctgatttggcctgggtaagccttttggagccccggttaa

SEQ ID NO: 222 - DNA, 699 bp, Homo sapien
  misc_feature (1)...(699): n = A,T,C or G
ccttntnaagagttggcattaattcttcactaaatgtaggagtagaatttatcaggtaagccacactgacctctggncttnttnncgcccgatgatttttaattagttgaatccctttacttgttatatatgtattcatatattctgttccttcttggatttacttttatgattggtgcctattgaggtatttatttctagtttgtggtacttcatgtgtttaggttttctagacagtggacatagaagattcaagaagctaaatgtaggagaatgtntaatgtagganantgaggcnacnatatcatcaatgaatgacttgaagtttcctctgttgtaaagaatgatattaccataactgccatagntaatattgatggtgtaagtcaaataanaaggcaggaggaaagggacatccatcactgaaccacanatcagagnctcattgaagcctttgagaagaatccacaaaattttacaggataattcatttcctgcgatcaccacnagaagagaaactggttaaacagacaggtattccagagtccaaaaatttacatttggtttcngaaccaaagacctcagctcccaggccacagcaaaagggggcttatgaattccctggcacccagncccaagacccaanaacctcatcttgattggtttngggcttgggaaaccaaaaaaccaatgggtggc

SEQ ID NO: 223 - DNA, 598 bp, Homo sapien
aaaaagagaaagtttcagatttgccattcaaggcttatttatatatatgtgtgtgtatataaatacatgcacacacttgcatacatatatatttttggctgggggagtgtgagttttgcctttctaagggagggaccgcgcaggctcctttgttctgtattctggcggagatgggtcctggccttgtgtcactggcttatccttaaagatcatctcccatcctccccagcgccatctgtgtgcagcaaccagaaagggatgaacttggccctcttgcgggcctggacaaggtctcttccttaccctttctgttgccagtcagcaacctgtaactcacattctcttcccagtgaatccctgggagcgcctgaccctggtgggctgttcagcttcctgctgctggggccagcaatttttgaggatttatctttaggccaggcttgcctccgtacttatccctgctctcccatttctctcttgtttgagagagaatgaggaagcaaagagtgagaaagaataggggctgaagacgccactcccagatggctctttctatcctgctcttctgttgaaacacacgtgctgtgggcctcaggcg

SEQ ID NO: 224 - DNA, 501 bp, Homo sapien
  misc_feature (1)...(501): n = A,T,C or G
aaacctttatgatgacttccttatgaattactgaacgaacactggaatgggactcaggtatcctgaggacatctctcaactctggccttagttccccctctgtaaaattagggtgccaactaaatgatctacaaggtcccttccagcgccgccattctgtaattacatcatgtgtaactgtattaaacatacacaagtgactgccaggcatgggaatgtaacttccgagtaaatgctttggtttgttcagaatacactatgaacttctttccaaagacgggttgtggtaaatagtggatattttgattataagaaatagagtttccttgaagctttagctggagatacagcaatagtgtggtgttcctacaaatatcacagtgtattcaaacatatttttctatcaaaaatcatttttgtaaaagctgtgtgtttttatccaacttgtgataataaatgttctttattttagaacaaanaaaaaaaaaaaaaaaaaaaaaa

SEQ ID NO: 225 - DNA, 295 bp, Homo sapien
cctgtatagggctcgtttccccacacatgcctatttctgaagaggcttctgtcttatttgaaggccagcccacacccagctactttaacaccaggtttatggaaaatgtcaggaaaaaaaaaaaaaaaaacacatgcactcacacaatacccaaacatcaraattagaagggcataaaacagggggctttataggctgaaaaatatcttaratttcaraacagaataccaatcaaatattgaaaattcctttgttcaaaacacaaagatgttttgtttttaatgggagttttttt

SEQ ID NO: 226 - DNA, 372 bp, Homo sapien
agattcctggcttagagcatgcgagcattgaaggaccaatagcaaacttatcagtacttggaacagaagaacttcggcaacgagaacactatctcaagcagaagagagataagttgatgtccatgagaaaggatatgaggactaaacagatacaaaatatggagcagaaaggaaaacccactggggaggtagaggaaatgacagagaaaccagaaatgacagcagaggagaagcaaacattactaaagaggagattgcttgcagagaaactcaaagaagaagttattaataagtaataattaagaacaatttaacaaaatggaagttcaaattgtcttaaaaataaattatttagtccgtatgaaatgaaat

SEQ ID NO: 227 - DNA, 599 bp, Homo sapien
ggcccccgtcgcgggagccgcttcgggccttctgggcatgtctgccatatggctccaggtttgtttttctccccggcactctgacggggagggctcccggcatctcctggcatccgggtagaggacgcggaggatgctgagctgctggcgcactgcagcacaactagagatgtacggatgcccccatcttgatcttacagaatcagaggtacagccgcgagaaagagtcaagaacagacagagtcgcttgaggactcaggagggtgtttgctgcgttgacaacagactacaccctcacagtttgctctgctcttccaacaccagtggaagatgatcacatcccagggatcagtgtcgtttagggatgtgactgtgggcttcactcaagaggagtggcagcatctggaccctgctcagaggaccctgtacagggatgtgatgctggagaactacagccaccttgtctcagtagggtattgcattcctaaaccagaagtgattctcaagttggagaaaggcgaggagccatggatattagaggaaaaatttccaagccagagtcatctggaattaattaataccagtagaaactattcaat

SEQ ID NO: 228 - DNA, 343 bp, Homo sapien
aaagtaaattgtatgaaaaattcatttcttcaattgcattagccacattttgagtattcatgtggctggtagattctgtattagcacaaagatatggaacatttccatcaccacagaaagttctgttggacagcactgcattagaatattttcatactgctcttcctcaattaatttttgttgttaatgttgatgtcttcattggatgggtcataatgttccatgaaaccgctcaagtacacaattgtatgttctttgtatcccttaccacaaatatctcgctctgctcatttcttttgcagcttcctataaagtttgtcttcctcaaaaaaaaaaaaaaaaa

SEQ ID NO: 229 - DNA, 417 bp, Homo sapien
ctcaagctgcagtccaccgggtatggttctggatggttcccccaagggagcaggtatgtaggaggtgaagaaaactgagatttcaagtatgggagagtttttactatctccattcctggattaaaagtgctgaaaaagtccacagttaaacattcctttattcaccctatggctcccaagaaaagcattcttcctctggagtactggtgtactaaggggacaatacaccaaatttgttgagtttacaatcaagtctactaaggttggacttccttatcagtttggcagagtcccagggcagaataatcatccatctacaggtctctgtttcctctccctccgcagcagtggagagcatcccagtgtttggggcactgtgttcctcttcgtccctgcaccagaccctggaagccttgg

SEQ ID NO: 230 - DNA, 462 bp, Homo sapien
gaaataccagaagagaaagtttcattgtgcaaatctaacttcatggcctcgctggctgtattccttatatgatgctgagaccttaatggacagaatcaagaaacagctacgtgaatgggacgaaaatctaaaagatgattctcttccttcaaatccaatagatttttcttacagagtagctgcttgtcttcctattgatgatgtattgagaattcagctccttaaaattggcagtgctatccagcgacttcgctgtgaattagacattatgaataaatgtacttccctttgctgtaaacaatgtcaagaaacagaaataacaaccaaaaatgaaatattcagtttatccttatgtgggccgatggcagcttatgtgaatcctcatggatatgtgcatgagacacttactgtgtataaggcttgcaacttgaatctgataggccggccttctacagaacacag

SEQ ID NO: 231 - DNA, 328 bp, Homo sapien
ctgtgggttttcctaaacgcccctcatctggttgaagccctagtgtttctttctcacatcagaggcaaatgcattggggtgggtctggtttggacaataaatttcctctggtttggaccaagaaaaacagagttctttgaccgctaacatatatgtaaaaagaaagtttgtaaaaacaagagttaaaatgcttctaacagtgtggtcatcactgcacaggacactggaattggcattcggggttgtgtctgtccatgtggtttcgttgtatgtcatgtgctctcagctcagacagagacatccaattgacttctgacttggggcattt

SEQ ID NO: 232 - DNA, 595 bp, Homo sapien
cgccaattttagcaaataagagattgtaaaagaagcagattgaatgaagaatttttagctgtgcagataggtgatgttgggatggaaaatgctaatcaactaccctttcttttatcaagtaattaaaataaatctacataaagaaccaaaaaggctgttttataaaagtgaaatatccagtatttcagagggccaggcaagagcacttcagatgaggcagtcaaaatcatttttttccagtgaggatagaccacaagtgggtggtgagaccattgaaagcctttatcaactgaagagtccatttaacagcataatttgtgggaagactggaatagggctgaataaatgtgtttgaatctctaattttatactttcttttcctgaggaacttgatttttctgtccctggatcgccttgtcataattgggtctgttccttttactaccactcttgagtccatatatgaaatcattaaagttggatgatcagttttttataaaaatatatatttttgtccaagaaaaaaaaaagcatacatatgtgattatggctaaatcaaaggtaactggaatgtatatacttttgctaatgttcc

SEQ ID NO: 233 - DNA, 600 bp, Homo sapien
atgaaggtaaactctaaaatcttcataggtcaacaaagaaaatttatccttcacacttatttctagaaagcagcagggcttatttcctagattgcttacaatgaagctagaatatctgcgataactgtagagtttcaaaaaggatccctagggctacttctacgttctccttaccagttgagcactctccataatttccagacgggtcatgggggagaatgatagaaatgagcgtgggaagaaagacaatgaaattagaaatgggtgagacacatggtggtagaatgctaagagcagggatcaggacaatcaaccaggtgtctaggaagggtcaagtcaccagtgtcatctgctgaccaatgttaggaagaaataaactcaaaggaaacaccacatttttccaattaaactcaaatctattgacttgtggtggttctttgatgttgtggggactgctataacagaaaccaattggattttcaagggcaagaaactttgccactgaataagatgatgtcatccttcctgataacaaataggaatgggtggtcagctctaaacagcgtggactgagggagttgcttttctacaatattactt

SEQ ID NO: 234 - DNA, 500 bp, Homo sapien
aaattcctaattcttttactatcttctcaacttttcccaaagataaaataaatttcacataatttcatggaggggaaatggtagttgtaaaaaactacctcaagtagcaatcaccgctggcagtgttttctcactttctgttctgcaattgcaatcacacttccaaaaagaaaagcaaatgtttgctaaaccatagacagacaacctctttgtgactggtattataaggtttataatgaaaacttatcaaatataaaaggtgctccctcttgaaaatgtgtattttatttgaagttttgagtaagaggtgagtgtttggcaattttcaacactcccctcaaaaatctcccaaagttgcaaaaaagtcagtttagtaaaattccaagcacttaaatgcttcattgagggccagttgatatacgcaatgcactaatgtgtaaaaattaaccgaatgcaactattttataatggagagctcttaccttttccttccagttttt

SEQ ID NO: 235 - DNA, 159 bp, Homo sapien
aaaatttacagataaaggcagttcaatactgccactgagaagtacatctcttaacatatacaactttcaggccacagttttgaaggtctgaagtattaagttggtttgatgaattagtcggttggcacttacgaacacatttattgccttgccatcttt

SEQ ID NO: 236 - DNA, 254 bp, Homo sapien
aaataagtgaataagcgatatttattatctgcaaggtttttttgtgtgtgtttttgtttttattttcaatatgcaagttaggcttaatttttttatctaatgatcatcatgaaatgaataagagggcttaagaatttgkccatttgcattcggaaaagaatgaccagcaaaaggtttactaatacctctccctttggggatttaatgtctggtgctgccgcctgagtytcaagaattaaagctgcaagaggact

SEQ ID NO: 237 - DNA, 591 bp, Homo sapien
  misc_feature (1)...(591): n = A,T,C or G
tttttttttttttttttttttttttttctaatttttactttttctcaagtttaatgtaracatacaaraaaacatcaagcaatgtttattgkgcaattccaatcattatttgcaraatcttggtttaaagtcagtytttatagccatttcaactgcttggtttaaacaaaaagcaacaatctggttatytacctataaatttcatggtatttytttaaacactgaagtactaaaagcactgatgatttgtattataatttttaaaatatttaaaacctacacagatttcataratcattccttttataaaataatcaaaataatttgattatytggaaaaaaaaattcttgaaacaragccctttccaggtatyttcaatctctgtaaaaccccaaaccccaaacagagtaratgatgaaataaggatttctcagttgcccaagactgtctgaaatttaaggttgaaaaatggactggcgtttttcatgtttcctgngaattcanagcttacaggtggcatcaaaactcaaatctctgggatggctttacatggctttcactttgatttgtttcattttcatttgcttctt

SEQ ID NO: 238 - DNA, 252 bp, Homo sapien
aaatggcttttgccacatacatagatcttcatgatgtgtgagtgtaattccatgtggatatcagttaccaaacattacaaaaaattttatggcccaaaatgaccaacgaaattgttacaatagaatttatccaattttgatctttttatattcttctaccacacctggaaacagaccaatagacattttggggttttataataggaatttgtataaagcattactctttttcaataaattgttttttaattt

SEQ ID NO: 239 - DNA, 153 bp, Homo sapien
ccacaataaagtttacttgtaaaattttagaggccattactccaattatgttgcacgtacactcattgtacaggcgtggagactcattgtatgtataagaatattctgacagtgagtgacccggagtctctggtgtaccctcttaccagtcag

SEQ ID NO: 240 - DNA, 382 bp, Homo sapien
aaaaaaaccatctaaaagtggttttttaatatatatattttttccaaaggaagaaatttcttgcttttactcagggaaaaaaaaaaattaaggtacatttgagtagaatgatttcatctaaaagagttctttcaggagacatctgtgattcactgcattgtttttattttcttctttttcctcttcttttccaacatttctaccattttcctcttcttggttgatatcaggccactttcttttgttgctttcttactgtcacctgttaaaccgcgtttctttgtgttaggttttgaccgcttttcttctttgtgcactgtgtcaccaggctcctttttgccaattttggactgttctttacttacaggagaaggctctgcag

SEQ ID NO: 241 - DNA, 400 bp, Homo sapien
ggcatgagccaccgcgcccggccctatcttttacttttataaatagagatgaagtttcaccatgttgcccaggctggtatcgagctcctgggctcaagcgatcccccaaccttggccttccaaagtgctgggattacaagcgcgagccaccgaaattattcttaactagcaagactaggctctgacatcacatccttatagttacatccctttaagcagggttcagccactcactctgcacctggagaacttgatggttatccctcgaagtgacagtcctgcaaatgacaaaaacactccaaatctattaggttggtgcaaaagtaattacgctttttgccactgaaagtaagtcccacaggaccctgagggaaatgggagggtggggtatacatagcag

SEQ ID NO: 242 - DNA, 75 bp, Homo sapien
actcacatatgcagacctgacactcaagagtggctagctacacagagtccatctaatttttgcaacttcctgtgg

SEQ ID NO: 243 - DNA, 192 bp, Homo sapien
gctccacatttgtagcgaacactttgactccaaagagaaggaggaagacaaagacaagaaggaaaagaaagacaaggacaagaaggaagcccctgctgacatgggagcacatcagggagtggctgttctggggattgcccttattgctatgggggaggagattggtgcagagatggcattacgaacctttgg

SEQ ID NO: 244 - DNA, 616 bp, Homo sapien
aattttatagcaatatactgaccattctaaaaataacaaaatacatgttgctctcaactacatagttaaaaaaggtagtaaattctcttacccaaaatagaggaggggtgggctagtgagctgctcaaacatttgtaacaaataaaaatgtatctatatacatataatgatcatgttttcatagcctaaaatcaccatacaaaatctaataataaaattgtgtcgtgttcaggagttgggaagccaacacattaaattaacaaagtatttttggtatatgtaaataatgggatagaatctctcgaatcaggattgtcccagaagttctaaggcagatgtcaatgacatgcacattgtccatgttcagtaattttcaaagactagaataaactatgtaaactattcaatacaattcaatattacttaactgctaaaaagtacttcaagatcttgcactgccttgagtgagtataatcaaattagtaattggaaaatagctgtaatagcaggcactgaagaattctgacaaataccaaataactgtttgtttttaccaaataaactggtaagatgatatcacaaagggttttaagttattttgctatacaaggttttt

SEQ ID NO: 245 - DNA, 165 bp, Homo sapien
ttggaacagtggattaaaatccagaaggggaggggtcatgaagaagaaaccaggggagtaatttcttaccaaacattaccaagaaatatgccaagtcacagagcccagattatggcccgctaccctgaaggttatagaacactcccaagaaacagcaagacaagg

SEQ ID NO: 246 - DNA, 229 bp, Homo sapien
tgtactggatccctccaggtgggggcgactctcacctgactattacaatagcctcctaagtggtttccctacttgcaaccttgcccgtataatatctatcctccacacagcaggcagggcgatcctttaagaatagaagttagatcatgaaaatgctctgctctgatccctgcaaaagctcgccacctccttacagtcaccgctgaactcgtagcagaggttcaggagg

SEQ ID NO: 247 - DNA, 338 bp, Homo sapien
  misc_feature (1)...(338): n = A,T,C or G
ggaaaccgtgtgtacttatcctggatgatgccaccagtgccctggatgcaaacagccagttacaggnggagcagctcctgtacgaaagccctgagcggtactcccgctcagtgcttctcatcacccagcacctcagcctggtggagcaggctgaccacatcctctttctggaaggaggcgctatccgggaggggggaacccaccancagctcatggagaaaaaggggtgctactgggccatggngcaggctcctgcagatgctccagaatgaaagccttctcagacctgcgcactccatctccctcccttttcttctctctgtggtggagaaccacag

SEQ ID NO: 248 - DNA, 177 bp, Homo sapien
tgaaaacaaatgaattctcaactcctacggttcatgtagagtttagagaaaatttccatcattgtcatcattgaactgtgaacctgggaagccagatcatgattaacactgacatcaagtttcaagttgcagatcaatgcacccagtgttcagatgaggcaaacttctccgtgacaa

SEQ ID NO: 249 - DNA, 263 bp, Homo sapien
aaagtaatgactttattaataaatatacatccatatgatgatgtagatacaaatcatgaacactactccattcccatacacataattgcacacgagtagctcaagttcatggacataaaaacatacacagtatctattcagactttttacagcagaggacagcgtgcttattatcagttaattggtaattattttctccaaaattacctgtggaaaaaagaaattctgaaaacttaaaagaatcaaagtgatctgattacttt

SEQ ID NO: 250 - DNA, 333 bp, Homo sapien
aaaaaaaacaacagcgtaaatattagcccacaagagcagtcctaaacaatcacaattacactgtactacccaagaagactgtttattgtgaagcatttacctttcaaaaaatcattacatttctatttcttggtggagcagcacattgtggagtgtgattcttaattcttcattgagtttgtcaataggacattgatgctggataggttgtcttttgtttttatgcctcagaccatcttgtgagattgtttgcctatctcataatacagttttatgcagaaaggttgaaactatgtaaatggtttttatggaaattatcagttacaatatttt

SEQ ID NO: 251 - DNA, 384 bp, Homo sapien
aaaccatttgtacaaaacttctataaatttttctctctctttctctcttatgtacaaaaatatcttaatatatccccgaactggttaggatagatacaaatagattttttataataaaaaattcacaaaagattggaagcattctataatgaaaatggtagaaaagacagtgtgagggaagccatggggtttgggaatcgggccctggaggagaagcagagtttcaaagggctgagaatagcatagtttcactgtaaaccaatgtctacagcttattggggtgggggctactgagacgaaagacaccaactcgtttctagagggctaagaactgcactttaagaaagggcggggaggtgaagggacccgagcaagaactttcag

SEQ ID NO: 252 - DNA, 211 bp, Homo sapien
aaagcagtctgaaaatgggacatctgtagagaaattcatttccttcttctcctccggatgtggaatggaagctttgagggaaggaaaagtaggaaaagagcgggatgggatgggatgggatgggatgggatgggataggaagagaggctggggaatgggcagagaagggggtgctgagtgtgctgtgagatagagcaagatcacaagaagg

SEQ ID NO: 253 - DNA, 135 bp, Homo sapien
aaaaattgtttcttgacaagctgacttggcacttaagtgcacttttttatgaagaaaaagtacaatgaactgcttttcctcaagcaataattgtttccaacttgtctgggaattgtgtgtctggtaactggaagg

SEQ ID NO: 254 - DNA, 361 bp, Homo sapien
cctgtagcccctgctacacgggaggctgaagtgggaggatcacttgaaccaatgagggtgaggttacagtgagcccagatcatgccactactctacaggctgggtgataagagtgagaccctgtatcaaaaaaaagacaaggaaaaaaaaaactgggccgtttgtttttgcagaatgtctctcaatttggactttttgggcaggaatacaatacaagtgatacaaatgcttctttaacattagaacctgtataaaattaccattacagaccttgctattttacttataggtaaatcactgtttaccaaggtaagtcttttgggaatttccaaaaatgaagtccatggacagttaaaaactg

SEQ ID NO: 255 - DNA, 331 bp, Homo sapien
aaaaaaataaataatccaccaacgtgattgaccttggcgagatcatgtttctagtctatacctcagtttccccatctgtaaagtgaggataatgtcccaccccatgtaactgtggtgaggaccaactgcaacactgtgcctgcgagtctccttggaaaagtgtaaggttctacacaaatggaaagtgatctgatcacactcagtgtccccagcccagcctttcagtgccctggccctggggtgggggacaatactctcctcacccccttcactagtcttcatgaatagcaaggaggccataacataatttggtctaaaccccttccttttt

SEQ ID NO: 256 - DNA, 186 bp, Homo sapien
  misc_feature (1)...(186): n = A,T,C or G
cctttgggcccttgcactttgacctgcaatggggccacaccagccttgcttgtgtccacctggaaggactgagggaggttggcacgaaccatgcctgggctcaggccgggcccanagcacttgaccttggacgcatctgtcacatcatgcacagggaccttgaaaggactgcctggcacttgatgg

SEQ ID NO: 257 - DNA, 255 bp, Homo sapien
ctggggtccgtcaccgacctttggggaactgggctacggggaccacaagcccaagtcttccactgcagcccaggaggtaaagactctggatggcattttctcagagcaggtcgccatgggctactcacactccttggtgatagcaagagatgaaagtgagactgagaaagagaagatcaagaaactgccagaatacaacccccgaaccctctgatgctcccagagactcctccgactccacacctctcgcggcag

SEQ ID NO: 258 - DNA, 604 bp, Homo sapien
ctgaatttgcaatggagtttggtggtgcaatcggtattgattagtttggcatagacagatgcagcagtttagagcaaaatcgagaaaatgattttttttttcctccttgatttcctggcagaagatatcttactttttcagcaaacttttcttttaacactaaagcagcctagggcaatgccagatacttagagcttttctcttgattataagtagaaatgggggtgtctgggctagaggtggagggtggatgtgctgtcgtcacagtctagctggcagcaagcaaggcaaaagcagagactgctctagaagcggttccaagcagcagagacgtcaggaaaggcacttcttagtaccaacctctatgctttaatagttgcttgttaagctgcttcatgggttgagacaaactaccagcacttcaaagagctcagttctctgctcaactctcttctctagttacattattttttttccttcaggagactgaggcaggaaaatcgcttgaactcaggaggtcgaggccgcagtgagccaagatcacaccaccgcactccagcctgggccttgcaaagtgctaggattacaggaatgagccaccagg

SEQ ID NO: 259 - DNA, 429 bp, Homo sapien
aaaaatgtctgtatcgagatcttccagtttgaagtcttcctcctctgtgtcttcccaaggctctgtggcaagctccactggttctcccgcttccatcagaaccactgacttccacaatcctggctatcccaagtacctgggcaccccccacctggaactgtacttgagtgactcacttagaaacttgaacaaagagcggcaattccacttcgctggtatcaggtcccggctcaaccacatgctggctatgctgtcaaggagaacactctttactgaaaaccaccttggccttcattctggcaatttcagcagagttaatttgcttgctgttagagatgtagcactttatccttcctatcagtaactgctccgtgttcagactcctggtttcttccaggcttacagtggacatcatcagcttcctgcttt

SEQ ID NO: 260 - DNA, 385 bp, Homo sapien
  misc_feature (1)...(385): n = A,T,C or G
ctgcaacacatgcagcaccagtctcagccttctcctcggcagcactcccctgtcgcctctcagataacatcccccatccctgccatcgggagcccccagccagcctctcagcagcaccagtcgcaaatacagtctcagacacagactcaagtattatcgcaggtcagtattttctgaanacgcatatggcagacggatttgcgtataccaaggagagtggcataggagggaaaagcatatgtggctgaaacctgtaagttggtgttggttatgcagaaatgtgtaacagatcaaacggtcctctcaagtgtctattanataggcaataagaactgcagtgtagctgagtaacatcttttagctgactataaatcactttgttttt

SEQ ID NO: 261 - DNA, 230 bp, Homo sapien
ctgtactggatccctccaggtgggggcgactctcacctgactattacaatagcctcctaagtggtttccctacttgcaaccttgcccgtataatatctatcctccacacagcaggcagggcgatcctttaagaatagaagttagatcatgaaaatgctctgctctgatccctgcaaaagctcgccacctccttacagtcaccgctgaactcgtagcagaggttcaggagg

SEQ ID NO: 262 - DNA, 198 bp, Homo sapien
  misc_feature (1)...(198): n = A,T,C or G
atgttaagtaaacatgaaatctatataacagaacaaaaattcactcttatgtcaatgtcagcgtgttaatgtagatctatttactganacagactctgtagtggcagagagtggccttgttaagccaggaccctgttctgcaggctgtgggtagaagctaggaagtccctggagtttcacccagcttttccatgaatg

SEQ ID NO: 263 - DNA, 157 bp, Homo sapien
aaaatatatttctaaacagaatgggccgactcagtcacagtaactgttgatctccatagtagagcaacccacaaagacagaactgatttttttcccataatcaggggtgaaaaatatacaacttgtttctgaaccaaaaccacaatttctgcagttt

SEQ ID NO: 264 - DNA, 290 bp, Homo sapien
ctggctactccaagaccctggcatgaggctgaggacaacttacaagggcttcaccgaagcagtggacctttattttgaccacctgatgtccagggtggtgccactccagtacaagcgtgggggacctatcattgccgtgcaggtggagaatgaatatggttcctataataaagaccccgcatacatgccctacgtcaagaaggcactggaggaccgtggcattgtggaactgctcctgacttcagacaacaaggatgggctgagcaaggggattgtccagggagtcttgg

SEQ ID NO: 265 - DNA, 234 bp, Homo sapien
aaaaaaaggaaaggaaagagaggaaaagaaaataaaataagacgatttattgcttctcctcagcatcctccttggtctcctccttcaccgagagagcttctagcttttccgccactttttcggcatgatcatttttgcctgatcctttcttttctctctcttcgatctctttcctgcattcttcaaactttgttttgaatttctgtgcattctcagcattcaggaagcggatgg

SEQ ID NO: 266 - DNA, 335 bp, Homo sapien
gtcctcatcatcccagtttgaggcagtgctggagtggggaaggccgtcttagaccatagaggttggaagacgctgagagatcatccagcccagccccttgatgttacagagcagaagacagatgcccaaacaggagaaggcacttgcccacggtcatacggcaggttgccacaaaaccaagatggcagcccttcctcagcgtgcctcactgccactcccagagccagggagccccataaaacccacatcatgtcttaagagtatatctggctccttgaccagcaatcggccctgggagccaccaggtgggaaaagcgcctctgccagagtccagg

SEQ ID NO: 267 - DNA, 619 bp, Homo sapien
  misc_feature (1)...(619): n = A,T,C or G
tggagctctgacgaagggatcggggaggtgctggagaaggaagactgcatgcaggccctgagcggccanatcttcatgggcatggngtcctcccagtaccaggcccggctggacatcgngcgcctcattgatgggcttgtcaacgcctgcatccgctttgtctacttctctttggaggatgagctcaaaagcaaggtgtttgcanaaaaaatgggcctggagacaggctggaactgccacatctccctcacacccaatggtgacatgcctggctccgagatccccccctccagccccagccacgcaggctccctgcatgatgacctgaatcaggtgtcccgagatgatgcanaagggctcctcctcatggaggaggagggccactcggacctcatcagcttccagcctacggacagcgacatccccagcttcctggaggactccaaccgggccaagctgccccggggtatccaccaagtgcggccccacctgcagaacattgacaacgtgcccctgctagtgccccttttcaccgactgcaccccanagaccatgtgtgagatgataaagatcatgcaanagtacggggaggtgacctgctgcctgggcanctctgcca

SEQ ID NO: 268 - DNA, 147 bp, Homo sapien
cctataacccagacaccagcatggacaaaactcagttatactgaattcagagacaaaattcagtgacactcttctaccacttatttagggttctacagcatttcactgagcagacttagttttttgtttttgttttacaaacctttt

SEQ ID NO: 269 - DNA, 325 bp, Homo sapien
ctgagctgtaggaatgggttcttggtacacaagatagtattgttgagctagttttcgagctctgtgcacaagcactctgtaatcggggcccatgccactgtacaccaaacctatatgcttggtaattggttctactttgtgtacacttcgctcatcatacagaatggatttctgttttttctcagttgctaataccacaccatttgcagctttaattcccacggacggggctcctccagctacagcagccaaagcatattcaatctggacaagtttaccagacgggctgaatgtagtcagcgaaaagctgtacccgcgctccgcc

SEQ ID NO: 270 - DNA, 428 bp, Homo sapien
aaacatatggtaaattaccgagtgacacctctgggctagagacctcttttgaggggagtttgcaaactacggattcaatttctttaacagttatgaagttctttaaagaacctgtttggtattggggggttgtggtcacctgtgcttttctgagatttggcccctacatctaagttgttgaatgcatgtgtgtagagttgtttatggtgcttccctttcttcttagaagggtctatagtaatatcccctgccttatccctagtagtactaatttgtgttttcttacttcttgacaggcaaacacatcagagcataagtggttcctaatgccaagctgacctcccttgatctctgtcttctacaggatattgacatgggacttctttattaccttttcagttcactgataccttcaaatagctttattt

SEQ ID NO: 271 - DNA, 206 bp, Homo sapien
  misc_feature (1)...(206): n = A,T,C or G
cgtcccggagcccacggnggncatggctggcanagcgctctgcatgctggggctggtcctggccttgctgtcctccagctctgctgaggagtacgtgggcctgtctgcaaaccagtgngccgtgccagccaaggacagggtggactgcggctacccccatgtcacccccaaggagtgcancaaccggggctgctgctttgactcca

SEQ ID NO: 272 - DNA, 83 bp, Homo sapien
ctggcttccctgagaactcaacaatgccttttcctgagggccttcctcgatcatccacaatgactacagccctctctacctgg

SEQ ID NO: 273 - DNA, 472 bp, Homo sapien
ctggagaaggtgtgcaggggaaaccctgctgatgtcaccgaggccaggttgtctttctactcgggacactcttcctttgggatgtactgcatggtgttcttggcgctgtatgtgcaggcacgactctgttggaagtgggcacggctgctgcgacccacagtccagttcttcctggtggcctttgccctctacgtgggctacacccgcgtgtctgattacaaacaccactggagcgatgtccttgttggcctcctgcagggggcactggtggctgccctcactgtctgctacatctcagacttcttcaaagcccgacccccacagcactgtctgaaggaggaggagctggaacggaagcccagcctgtcactgacgttgaccctgggcgaggctgaccacaaccactatggatacccgcactcctcctcctgaggccggaccccgcccaggcagggagctgctgtgagtccag

SEQ ID NO: 274 - DNA, 205 bp, Homo sapien
ccaggcggcccgaggacttacggtcggcacttctctgttctcccgtgtcagcgtgtggtgtcgcctgcatgggtcgtacctggatggtgtgtccaccatcgacacggaggggctggatttgtttctcaggcaatcctgtattttaattttagatgtatttcctgaagcatatttttcatagaatgtagcgtgtaaatagcttttt

SEQ ID NO: 275 - DNA, 308 bp, Homo sapien
ctcctcgccctccccaccgacatcatgctccagttccagcttggatttacactgggcaacgtggttggaatgtatctggctcagaactatgatataccaaacctggctaaaaaacttgaagaaattaaaaaggacttggatgccaagaagaaaccccctagtgcatgagactgcctccagcactgccttcaggatatactgattctactgctcttgagggcctcgtttactatctgaaccaaaagcttttgttttcgtctccagcctcagcacttctcttctttgctagaccctgtgttttttgcttt

SEQ ID NO: 276 - DNA, 201 bp, Homo sapien
aaattaactttttcttgcaaaatattcatttcattttttccaagaaaatcttataaaggcaaaaataaaattttattttggcaaatgtcatgaagtcgatactggcagcatatggagttagttaaaaatagacaacaactgctagatatattcaaaattctatttttttttctgagcatagtcaaagagaaattttcattt

SEQ ID NO: 277 - DNA, 520 bp, Homo sapien
  misc_feature (1)...(520): n = A,T,C or G
aaaaaaaaagtattcagcaccatttgctcatnggtctttcagagtttgttcttaaagtttctggaactttcctgtctgtaaagtaacaggaattactgagctacattggaaagcctctctgggacaggcagtggggagttaagcagtcatcataaaggaatcagtgtacattcagcatggtgacttgactacacaacaatcccttcccctctactgtagctcaagagagacatgcttctaaccactgaggtatgaggagtctcagactgttatttgctgttagaattggtcttcccagctaataacagtacatctctggcacagatgctattggtccttaatgtcctgtgattttaggaaatagtttggatttagttcaatttattcagaaaccaaacgtgtttaattagcttcactactctggcagagtaagggtatgctggtttagtatctttataaaatatatataatgtataggtaaatcatagtcttaaatcatacctaaaatactgtatcattt

SEQ ID NO: 278 - DNA, 264 bp, Homo sapien
cgcgccgggcggaactttccagaacgctcggtgagaggcggaggagcggtaactaccccggctgcgcacagctcggcgctccttcccgctccctcacacaccggcctcagcccgcaccggcagtagaagatggtgaaagaaacaacttactacgatgttttgggggtcaaacccaatgctactcaggaagaattgaaaaaggcttataggaaactggccttgaagtaccatcctgataagaacccaaatgaaggagagaagttt

SEQ ID NO: 279 - DNA, 414 bp, Homo sapien
aaacatacaataatttttattatggaaattaatctttacatacaaaatcagctacgtaattttacttacaaaacaataaaaactgttctttactgtggcaacaaaagaagcattttgacaaatgaaaaaaattaatgcaaacaaattaaaacaatgcttttctttttacttgcttcactgtctcttctatttattttctatgatcatttgacacaaacatggattactttgatatctactgaaacataaatgataaggttcttaaaggttgaattaaaagtctgggtgttcaatattttagaagctgaataaacaaaacgaaattggggtttgtgattacagaggatttatcattttttccctttgtccatatgaaaatatataatagaaaattacccacgggaaaacattttt

SEQ ID NO: 280 - DNA, 262 bp, Homo sapien
ccaccatgcctggcctgcttcaattttttgatgccactttgtaaacggcacttaattatggaaaataggaaaaagcaaaactaaaataaggaagaggatatatatataacttttcacaatctcttttctgatcccctttagatgcccagtcaaccaggaccacacacagatttcattttatttgtagagtatatgaaaagatttaatagtctcatgcattttattttacgtatactgatttctacgttttgactgactattt

SEQ ID NO: 281 - DNA, 349 bp, Homo sapien
ctgtgacccgggtgcatcagtggatatagttgtgtctccccatgggggtttaacagtctctgcccaagaccgttttctgataatggctgcagaaatggaacagtcatctggcacaggcccagcagaattaactcagttttggaaagaagttcccagaaacaaagtgatggaacataggttaagatgccatactgttgaaagcagtaaaccaaacactcttacgttaaaagacaatgctttcaatatgtcagataaaaccagtgaagatatatgtctacaactcagtcgtttactagaaagcaataggaagcttgaagaccaagttcagcgttgtatctggttccagcag

SEQ ID NO: 282 - DNA, 381 bp, Homo sapien
  misc_feature (1)...(381): n = A,T,C or G
aaacactaaatgaagcttctcacaatttctaattataaacaaaaggctgaaaacagtatgggaaacaaagtttcaaaacaaagaaaagttgagtaaaaggtgccccctctatggctcatctgaaagaaacattttactcagagaggcaaacatttctgatctaggagtaagtttcccactcactttgcaaggacccactcattctgcanaaagacctacaagtctttctggtctcaattgcaaagtacgtgaaaatgtgtatgaaagatctaaaagctaaatattagaataaggctaattgaaatcaaaattgtgtgctggtctaaatatacatcttcggcttcttcctttttagtaagtatttttatttcagatgtattt

SEQ ID NO: 283 - DNA, 543 bp, Homo sapien
aatatagctcctccctacccccaacaatggaccctgcccattgcctcccagttccttgatcttcctaggttccacaactctctttttccttttagttttattccctccagccaaacctctcttattcaatattttgagccaatgggggagttatgtagatttttttccctacacattagctggccccttttatgaccaatgactcataaggcaagatgtgtggtggcatcttcggacaggcagcaggctttaatagggcagcctgggttggtggaggcaagcaaagctaattggcatgcgtgggaatcaaaccccaggccctgggctcattagcccatggtcaaaacaactgagccagaggaggtaataatttgcccaagaatatcagtagttcctttattagaagaaaatggctgatatggaagttggggaatctgaattgccagagaatcttgggaagagtaataagctcttagtctcaacaaaaagtgttttttcatctcagcgcgtaaagggtgctatatgggaacaaagaagtatttt

SEQ ID NO: 284 - DNA, 147 bp, Homo sapien
aaactggtattttatctttgattctccttcagccctcacccctggttctcatctttcttgatcaacatcttttcttgcctctgtccccttctctcatctcttagctcccctccaacctggggggcagtggtgtggagaagccacagg

SEQ ID NO: 285 - DNA, 316 bp, Homo sapien
cggccgaggtctggcttcactcctactccctctctgctcgcagcacgtcggccgccagctctttgatgtgttcccaggcccgctgcacatgggcagattccaccgtgcgagaacagatggcaaagcgcaggacaaacttgtccctgaggtgacatggaaccaagtggatttttttggcactgtttattctttgcagaagagcttcattcactttgttggaaccctttagccgaaagcagacaagccccagaatgacttccacacagatttcaaagcggggatcctggcgcaccagtgactcaaactcatgggacag

SEQ ID NO: 286 - DNA, 322 bp, Homo sapien
cctggggagccctttagtggggtgggacctcaggcagacccccaaaccaaagggagccagatgcccaagttcaagtcattagtgatatgtggcagggctgacagagaaataatcctggaggtctccaaagctgctgggaatggaatggcgatgaaaagcgcaggagtgggcagggtgtggtgggtgatggtggcctcactcagagtggaccaaggccccagctccttgcccaaaaccaaagcccttgggcccgaagtttttagcataacatcctttgcagtaaatctcgccatccttgtctgccagggtggttgactcaagg

SEQ ID NO: 287 - DNA, 364 bp, Homo sapien
ctgcccacgctcaaaccaattctggctgatatcgagtacctgcaggaccagcacctcctgctcacagtcaagtccatggatggctatgaatcctatggggagtgtgtggttgcactcaaatccatgatcggcagcacggcccaacagttcctgaccttcctatcccaccgtggcgaggagacaggcaatatcagaggctccatgaaggtgcgggtgcccacggagcgcctgggcacccgtgagcggctctacgagtggatcagcattgataaggatgaggcaggagcaaagagcaaagccccctctgtgtcccgagggagccaggagcccaggtcagggagccgcaagccagccttcacagagg

SEQ ID NO: 288 - DNA, 261 bp, Homo sapien
aaaattataactactcattctttctttagccttagttaatttgagcagaagccacaacaagcaaaccacaataaatttagaattggcagaaatccacattaactcctcttcccaagtttccacactactaccatttacagttgtaggtttgtaatgtataattatgtaatgcagaaactagctttgacttgtgtaacgatgcactgtcaaagtaagcaaagtaagaattgaaattccacattcccagaatttaacactcag

SEQ ID NO: 289 - DNA, 261 bp, Homo sapien
ctgagtgttaaattctgggaatgtggaatttcaattcttactttgcttactttgacagtgcatcgttacacaagtcaaagctagtttctgcattacataattatacattacaaacctacaactgtaaatggtagtagtgtggaaacttgggaagaggagttaatgtggatttctgccaattctaaatttattgtggtttgcttgttgtggcttctgctcaaattaactaaggctaaagaaagaatgagtagttataatttt

SEQ ID NO: 290 - DNA, 92 bp, Homo sapien
ccactacccgaacttacaggtgccaaaagaagaaagggtataaacggagaccacctatcactcatcagaacctaggatcatcacattccttt

SEQ ID NO: 291 - DNA, 287 bp, Homo sapien
ccatggctccgctcagggccccggtcacctccgagtcactctgttccttgactgtctttgtgtttctgtacctcaaggcactgaagctggaggactctgtccatgcctgtgtcaccctcgtgtgggagcctctgggctcggcaggtccacatttcatgagctgaggcgtgggccagggccatctggaaagggaactcggcttttccagaacgtggtggatcatctgtcgggtgtgtggtgaacacgttcagttcatcagggcctacgctccgggaaggggcccccag

SEQ ID NO: 292 - DNA, 270 bp, Homo sapien
ccattgtttcctcgctggcgaaggctccttgaacatccctcaccttcctctcccgcctctgccttctgctgggtcaaaggtggccttttctctccagccttgaattgttccctgttggcttcccaagggcccatctgctggtacagtccacacttccacagccaagacccgagagggctttcactgccccaagcctctctcctgtgaccctgggattctgtcttggcagaatcctttgtcagcggctcttactctgtccttcctgtttgg

SEQ ID NO: 293 - DNA, 333 bp, Homo sapien
ccatgctcgtcaacctggtgtccactgcttgctacgtctccttcctcttcctgggctgcgacactggccctgtggctggggttactgttccctatggaaacagcacagcacctggctcagccctggacccctactcgccctgcaataataactgtgaatgccaaaccgattccttcactccagtgtgtggggcagatggcatcacctacctgtctgcctgctttgctggctgcaacagcacgaatctcacgggctgtgcgtgcctcaccaccgtccctgctgagaacgcaaccgtggttcctggaaaatgccccagtcctgggtgccaagagg

SEQ ID NO: 294 - DNA, 123 bp, Homo sapien
ctgatacaaatacagaaaactctgcccattatccaagaaacaaataattaagactaaaatgcaagctgatgtgttgcagcattgtagggccactaaatagccatctgtgattcgtggcaattt

SEQ ID NO: 295 - DNA, 311 bp, Homo sapien
ctgcatacagacatttgtttaggtcatctggattatcttgattgtcaccatggcaactatccacaaccagtgcctaggtgtgtgagaagagtgatacaataatactgtggcatggtcatttagctaatccagtctaagcctaacagaaaccttttccatcaaagtttttcagagaataacaacatctcataagaggccagaggatggcttgtgcttaatatcacacctgtacagtagggcagtgcttcccaggctgtctgcttacattttagcttgtcttacggttacatatggttttagtattttcattt

SEQ ID NO: 296 - DNA, 241 bp, Homo sapien
ctgcggaagatctgcaaccacccctacatgttccagcacatcgaggagtccttttccgagcacttggggttcactggcggcattgtccaagggctggacctgtaccgagcctcgggtaaatttgagcttcttgatagaattcttcccaaactccgagcaaccaaccacaaagtgctgctgttctgccaaatgacctccctcatgaccatcatggaagattactttgcgtatcgcggcttta

SEQ ID NO: 297 - DNA, 295 bp, Homo sapien
aaacacaagatgaaaatactctgttctgtccaaagcatcacctaatggtgtgaggcatctcacttagctgtggagaagtccttggaattagatctcagaaagacagctttaagacagtaaaaccttttggcaatgggctaattgccttaaaagaagagttctacctgaaagaccttgcaggtggagaaattgtcctacaaagattcttggatatgttagtggagataactgacatgggtagctgtgggtcaaccaggaactgtcaacaacctgatctctgcaaaaccaggatgga

SEQ ID NO: 298 - DNA, 347 bp, Homo sapien
ccaaaataaagcttcaggcaagaggcaaagatccagtggaatatgggagaatggtggaggaccaacacctgctaccccagagagcttttctaaaaaaagcaagaaagcagtcatgagtggtattcaccctgcagaagacacggaaggtactgagtttgagccagagggacttccagaagttgtaaagaaagggtttgctgacatcccgacaggaaagactagcccatatatcctgcgaagaacaaccatggcaactcggaccagcccccgcctggctgcacagaagttagcgctatccccactgagtctcggcaaagaaaatcttgcagagtcctccaaaccaacag

SEQ ID NO: 299 - DNA, 268 bp, Homo sapien
aaaaagtaaacatgaaaacatcacgaattgtaccatgattcaagaataacttttgtaatagaaaacacatgaccttttgcagtatagtgtgataccgaagtaaaagtgaaagaaataaatgcaggaaagtttaagtggatgtaagtttttataaggaaagtaataagaggaggctgcttttgaaggtcctttgatcttccatgatgataatatcgttgcaaagttctttaacttgtattcaagtaattagcagttgaccacttggttt

SEQ ID NO: 300 - DNA, 185 bp, Homo sapien
aaattggagaaggaagttttcctgaagagccagaatccttgctaagtcatttagatccaactgaccatctttatttctgtcaaaaatcttcatcatggtgccggtgtattcttccagtttagcctcagaaatggcctttctgtggtgaagaaagaggtctcggaggaagttgcggagctcagcag

SEQ ID NO: 301 - DNA, 75 bp, Homo sapien
aaaattggaaagtgggataagaaatctaaagtaaccagcttatctttgaaacaatattattttgaaattggcttt

SEQ ID NO: 302 - DNA, 247 bp, Homo sapien
  misc_feature (1)...(247): n = A,T,C or G
ccatgttctctgaattgggtgcagaagacaagggcagagtggctgcggcccctattacctttgtagcagccacatcagaaagcagaagaaaacagtatttctgaaggcattgtttgaggttgatctcagcactgaacgatttcaagccctacgcaccanaacagaaggagggtggaggaagtgatcanagggaacgagctgtaggtttgcanaaatgtgtgaaaccaaaatgatcactgcctacttg

SEQ ID NO: 303 - DNA, 535 bp, Homo sapien
ctgcttcagaggaaatcactgaaaaataaagaaaaaccatccatgcatggctgcatccagtgtacctgtaatcctgaagaaaaggtcctaattccttccatgctgaaatgctagctttggtttcagagagagactttattgcaactgtgaccaccgtcactggtgagcactgctgttcggcccccagcggacttaaaagactggaatgtggtagtggcggtcgttctcggtcagcagggagatctccggccagtccctgagaggctcctctgggtagcagacttcaaagtctctggagttaaacttgaacagtctgaacacttttatctttacttcaagggagtatccaagtataaacatatcaatctgctctagtccacatgtgtcgcctacagaattcaggtgattcatcatgaagctcaaaggatcagaggatgtctccctggaaaacaggagtctaaaaagactgggaatgacctttttagtcttcatttgttcataaacttcagtgacttgatacagcatgatgaacttt

SEQ ID NO: 304 - DNA, 522 bp, Homo sapien
ccgcgctcggtctacaatcacgttttattattggctcgtctagtcatgggatagagaaggtaaatagcaaaatagaaagaaaagggggaaaaggtagaaggcaaggggaaaactattggttttagatctttatcctggtcctgtcaatgatcaggtaattggaaggatcaaaattaggccaaacttggtaattgggccaaaattgaaccaaagtttgtgtcaagaagacctggggcagagatatgtgactaaatcatttggaatatgcccagaccccaagaatatttatgcccaacttgaatgctaaccagaagtcccttactgtagaagattgtaaggttgctatttttttgccccgacaccaaaatattgatgtattttccaacaccaattctccaattctctgacaccaactcgatgttcaacaattcagttatattctgtcactaattcctgcagctatcagcaggccccacaggtaaaggattcagtctcacaagattgcccccccacccacttcag

SEQ ID NO: 305 - DNA, 165 bp, Homo sapien
cctaaagcgctcctcgctgaagctcaaggggtccacaatgatttgtttgtcaaagttattgagtgcatatgccagttctcctcctcctccaccctggtgctgtgaggcatcgtctgaggcagtggcctgggctgcattggaaatgcctgtgaccgcctgctgcag

SEQ ID NO: 306 - DNA, 294 bp, Homo sapien
ctgcacctaagacatggccctggctaggcgggaacagctcacagtagcgatacattcacaggacacagttggtgtccagaaaagggggctcagaacacagtttctacacaagcacttggcacccacacgacagagacgtcactcaagcagcacagccacaaatagtttacagcagctcatgcccggcatccgcccatgctgggagactccctgaaaggtgggcacctgccgtctatgaggaggtgtctccctccatcattaaccccaaaccacacaatgtgtgaggagagcagg

SEQ ID NO: 307 - DNA, 181 bp, Homo sapien
aaaaatccatgacaccttgatagaaattagagtttacacaaacaaaaaaggaaccttcgatattgccagcagctataaagtgaacgtactgagaccgacaggacagcaagaaggcatttgcacatttatatctgacacccgaccatactttcagtcaccagaatatcttctctccagattt

SEQ ID NO: 308 - DNA, 179 bp, Homo sapien
  misc_feature (1)...(179): n = A,T,C or G
aaggctgaggactgctgggagctcagatcagcccggagctactggctcatgggcagccaaaaaatactggatctgctgaacgaaggctcagcccgagatctccgcagtcttcagcgcattggcccgaagaaggcccanctaatcgtgggctggcgggagctccacggccccttcagcca

SEQ ID NO: 309 - DNA, 129 bp, Homo sapien
  misc_feature (1)...(129): n = A,T,C or G
ctgcccgcttgcccgtagctgactcagnttcctcatcttcatctccatcctcttcctcaccatcaccttcttcttcctcctcctcttcctccccaccttcttcctcttcttcgtctacctcattgtcag

SEQ ID NO: 310 - DNA, 390 bp, Homo sapien
tgaggctgggggagagccgtggtccctgaggatgggtcagagctaaactccttcctggcctgagagtcagctctctgccctgtgtacttcccgggccagggctgcccctaatctctgtaggaaccgtggtatgtctgcatgttgcccctttctcttttcccctttcctgtcccaccatacgagcacctccagcctgaacagaagctcttactctttcctatttcagtgttacctgtgtgcttggtctgtttgactttacgcccatctcaggacacttccgtagactgtttaggttcccctgtcaaatatcagttacccactcggtcccagttttgttgccccagaaagggatgttattatccttgggggctcccagggcaagggttaagg

SEQ ID NO: 311 - DNA, 355 bp, Homo sapien
  misc_feature (1)...(355): n = A,T,C or G
cctctctgtgctgctgaaggcagatcgcttgttccacaccagctaccactcccaggcagtgcatatccgcctgttgagaaatgccgtgtctagattgtggacaagagcctgcgtgattatgctatangganaaaaattcttcgagttccacccnanctcctctaaacatttggctcactcaaaacaaaaagncaccaatcttantactgctgaacttcatttatgtnacctaacattaaccntcgtaggaaaaccaaatagccctctcgtncangatatgttgctaaaggactaccntgttcaacacaacggctccggtgtgtgaactcctgtttgggtgattcccctactctca

SEQ ID NO: 312 - DNA, 498 bp, Homo sapien
ccattcttttgaatctaatctattatcaatagcatcctccataatatctttgataaaaggtgtccaccgagagagctgaaaagtttcttctgcagaccgatcctttcttaacggtttgccttgttgagattggggaacaatgggaacaccaaggtaactccagttacgaatcatgtcactctcattttctatctttacattctggatcaacctgtccaaattttcttccgtagttccattaatactgaagatataaagtagaattgctcttattttatcacaattatcatgatttttgttgagtagaactggaaggagtactcgcatggaatctttcaccttctgtccttctgcatcagttccaagtgccaggtcctgttcagttttgcagagcttttctatattaagcttgaacttattcatgcaatcttctgctaagttaagatggacaacttgcttagtaatctgttttcggaaatagggcatctttttcatcag

SEQ ID NO: 313 - DNA, 653 bp, Homo sapien
aaacttatcagatttttttaagttaggtaatttcaatccacagtggctccatatggttaaaaaaacaaaaacaaaaacgcatttaaggatacacgaagcagtgaaaacaaagccccagtattttcgctaaagtactggaaatacctgtttctaaaaacagctttatatttgtccactgcctagaatagctctcacccaaacctcaaaaataagagcagatagattttagaagcaagaaaaggtaaacagtgcccatattatttgagactggctctgctgccctccctaagccagtttacattctttgagattcttggagtgggtgagtcagggctgaagactgcacaggccatgtcccctgctccaactattcctcagaacgtcccaggtggagggagtggcctgtcgattttcactcattccatggagctctgtgtacatgaaaattcctccaagtgtggcttttgtcgaattcagagatacagcaagccacgcataaaacatggagtgtagagcactggtgtacctagcttagaaacaccctcggtgaatgtggtactgtggctcgaaaggaagcaagggacaggacccaggagactgggcggccaggctctcggagttccacacacacctgtgaagcccggccagcacag

SEQ ID NO: 314 - DNA, 513 bp, Homo sapien
ctggaagattttgctgcatttggcattatactgtaatttacagtatacaacatctggggactcagtactatcttagcacagactaacttctcccactccgtcagaggtggcaggtggcgggtcggtggggagggccttttctccccataaatgcctgaactttaatttataccatataagaaatcagtgaaaggtaaacaacaaggttaatgtaactctattataaattttgcattttttttctctgtgacatatacaagtatatttttgtttttggagctataaattatttaatttagcaatcttcaaagctcataaatttcaacttttcaaataagaaattttaacttcaaataagaagtctaggactttatggctattaattttactatcaaaatatccaagggactccattcaatgtaatagttataattcttctaaatatcatttgaataattctttgtggacgctagactcaagactatgctacatccaaacagtacatctataacc

SEQ ID NO: 315 - DNA, 222 bp, Homo sapien
  misc_feature (1)...(222): n = A,T,C or G
atttatattcaaggnatctcaaagaaagcattttcatttcactgcacatctagagaaaaacaaaaatagaaaattttctagtccatcctaatctgaatggtgctgtttctatattggtcattgccttgcaaacaggagctccacaaaagccaggaagagagactgcctccttggctgaaagagtcctttcaggaaggtggactgcattggtttgatatgttt

SEQ ID NO: 316 - DNA, 1633 bp, Homo sapiens
cgtggaggcagctagcgcgaggctggggagcgctgagccgcgcgtcgtgccctgcgctgcccagactagcgaacaatacagtcgggatggctaaaggtgaccccaagaaaccaaagggcaagacgtccgcttatgccttctttgtgcagacatgcagagaagaacataagaagaaaaacccagaggtccctgtcaattttgcggaattttccaagaagtgctctgagaggtggaagacggtgtccgggaaagagaaatccaaatttgatgaaatggcaaaggcagataaagtgcgctatgatcgggaaatgaaggattatggaccagctaagggaggcaagaagaagaaggatcctaatgctcccaaaaggccaccgtctggattcttcctgttctgttcagaattccgccccaagatcaaatccacaaaccccggcatctctattggagacgtggcaaaaaagctgggtgagatgtggaataatttaaatgacagtgaaaagcagccttacatcactaaggcggcaaagctgaaggagaagtatgagaaggatgttgctgactataagtcgaaaggaaagtttgatggtgcaaagggtcctgctaaagttgcccggaaaaaggtggaagaggaagatgaagaacaggaggaggaagaagaggaggaggaggaggaggaggatgaataaagaaactgtttatctgtctccttgtgaatacttagagtaggggagcgccgtaattgacacatctcttatttgagaagtgtctgttgccctcattaggtttaattacaaaatttgatcacgatcatattgtagtctctcaaagtgctctagaaattgtcagtggtttacatgaagtggccatgggtgtctggagcaccctgaaactgtatcaaagttgtacatatttccaaacatttttaaaatgaaaaggcactctcgtgttctcctcactctgtgcactttgctgttggtgtgacaaggcatttaaagatgtttctggcattttctttttatttgtaaggtggtggtaactatggttattggctagaaatcctgagttttcaactgtatatatctatagtttgtaaaaagaacaaaacaaccgagacaaacccttgatgctccttgctcggcgttgaggctgtggggaagatgccttttgggagaggctgtagctcagggcgtgcactgtgaggctggacctgttgactctgcagggggcatccatttagcttcaggttgtcttgtttctgtatatagtgacatagcattctgctgccatcttagctgtggacaaaggggggtcagctggcatgagaatatttttttttaagtgcggtagtttttaaactgtttgtttttaaacaaactatagaactcttcattgtcagcaaagcaaagagtcactgcatcaatgaaagttcaagaacctcctgtacttaaacacgattcgcaacgttctgttattttttttgtatgtttagaatgctgaaatgtttttgaagttaaataaacagtattacatttttagaactcttctctactataacagtcaatttctgactcacagcagtgaacaaacccccactccgttgtatttggagactggcctccctataaatgtg

SEQ ID NO: 317 - DNA, 4235 bp, Homo sapiens
gaatccaagggggccagttcctgccgtctgctcttctgcctcttgatctccgccaccgtcttcaggccaggccttggatggtatactgtaaattcagcatatggagataccattatcataccttgccgacttgacgtacctcagaatctcatgtttggcaaatggaaatatgaaaagcccgatggctccccagtatttattgccttcagatcctctacaaagaaaagtgtgcagtacgacgatgtaccagaatacaaagacagattgaacctctcagaaaactacactttgtctatcagtaatgcaaggatcagtgatgaaaagagatttgtgtgcatgctagtaactgaggacaacgtgtttgaggcacctacaatagtcaaggtgttcaagcaaccatctaaacctgaaattgtaagcaaagcactgtttctcgaaacagagcagctaaaaaagttgggtgactgcatttcagaagacagttatccagatggcaatatcacatggtacaggaatggaaaagtgctacatccccttgaaggagcggtggtcataatttttaaaaaggaaatggacccagtgactcagctctataccatgacttccaccctggagtacaagacaaccaaggctgacatacaaatgccattcacctgctcggtgacatattatggaccatctggccagaaaacaattcattctgaacaggcagtatttgatatttactatcctacagagcaggtgacaatacaagtgctgccaccaaaaaatgccatcaaagaaggggataacatcactcttaaatgcttagggaatggcaaccctcccccagaggaatttttgttttacttaccaggacagcccgaaggaataagaagctcaaatacttacacactgacggatgtgaggcgcaatgcaacaggagactacaagtgttccctgatagacaaaaaaagcatgattgcttcaacagccatcacagttcactatttggatttgtccttaaacccaagtggagaagtgactagacagattggtgatgccctacccgtgtcatgcacaatatctgctagcaggaatgcaactgtggtatggatgaaagataacatcaggcttcgatctagcccgtcattttctagtcttcattatcaggatgctggaaactatgtctgcgaaactgctctgcaggaggttgaaggactaaagaaaagagagtcattgactctcattgtagaaggcaaacctcaaataaaaatgacaaagaaaactgatcccagtggactatctaaaacaataatctgccatgtggaaggttttccaaagccagccattcagtggacaattactggcagtggaagcgtcataaaccaaacagaggaatctccttatattaatggcaggtattatagtaaaattatcatttcccctgaagagaatgttacattaacttgcacagcagaaaaccaactggagagaacagtaaactccttgaatgtctctgctataagtattccagaacacgatgaggcagacgagataagtgatgaaaacagagaaaaggtgaatgaccaggcaaaactaattgtgggaatcgttgttggtctcctccttgctgcccttgttgctggtgtcgtctactggctgtacatgaagaagtcaaagactgcatcaaaacatgtaaacaaggacctcggtaatatggaagaaaacaaaaagttagaagaaaacaatcacaaaactgaagcctaagagagaaactgtcctagttgtccagagataaaaatcatatagaccaattgaagcatgaacgtggattgtatttaagacataaacaaagacattgacagcaattcatgttcaagtattaagcagttcattctaccaagctgtcacaggttttcagagaattatctcaagtaaaacaaatgaaatttaattacaaacaataagaacaagttttggcagccatgataataggtcatatgttgtgtttggttcaattttttttccgtaaatgtctgcactgaggatttctttttggtttgccttttatgtaaattttttacgtagctatttttatacactgtaagctttgttctgggagttgctgttaatctgatgtataatgtaatgtttttatttcaattgtttatatggataatctgagcaggtacatttctgattctgattgctatcagcaatgccccaaactttctcataagcacctaaaacccaaaggtggcagcttgtgaagattggggacactcatattgccctaattaaaaactgtgatttttatcacaagggaggggaggccgagagtcagactgatagacaccataggagccgactctttgatatgccaccagcgaactctcagaaataaatcacagatgcatatagacacacatacataatggtactcccaaactgacaattttacctattctgaaaaagacataaaacagaatttggtagcacttacctctacagacacctgctaataaattattttctgtcaaaagaaaaaacacaagcatgtgtgagagacagtttggaaaaatcatggtcaacattcccattttcatagatcacaatgtaaatcactataattacaaattggtgttaaatcctttgggttatccactgccttaaaattatacctatttcatgtttaaaaagatatcaatcagaattggagtttttaacagtggtcattatcaaagctgtgttattttccacagaatatagaatatatatttttttcgtgtgtgtttttgttaactaccctacagatattgaatgcaccttgagataatttagtgttttaactgatacataatttatcaagcagtacatgaaagtgtaataataaaatgtctatgtatctttagttacattcaaatttgtaactttataaacatgttttatgcttgaggaaatttttaaggtggtagtataaatggaaactttttgaagtagaccagatatgggctacttgtgactagacttttaaactttgctctttcaagcagaagcctggtttctgggagaacactgcacagtgatttctttcccaggatttacacaactttaaagggaagataaatgaacatcagatttctaggtatagaactatgttattgaaaggaaaaggaaaactggtgtttgtttcttagactcatgaaataaaaaattatgaaggcaatgaaaaataaattgaaaattaaagtcagatgagaataggaataatactttgccacttctgcattatttagaaacatacgttattgtacatttgtaaaccatttactgtctgggcaatagtgactccgtttaataaaagcttccgtagtgcattggtatggattaaatgcataaaatatcttagactcgatgctgtataaaatattatgggaaaaaagaaatacgttattttgcctctaaacttttattgaagttttatttggcaggaaaaaaaattgaatcttggtcaacatttaaaccaaagtaaaaggggaaaaaccaaagttatttgttttgcatggctaagccattctgttatctctgtaaatactgtgatttcttttttattttctctttagaattttgttaaagaaattctaaaatttttaaacacctgctctccacaataaatcacaaacactaaaataaaattacttccatataaatattattttctcttttggtgtgggagatcaaaggtttaaagtctaacttctaagatatatttgcagaaagaagcaacatgacaatagagagagttatgctacattatttcttggtttccacttgcaatggttaattaagtccaaaaacagctgtcagaacctcgagagcagaacatgagaaactcagagctctggaccgaaagcagaaagtttgccggaaaaaaaaagaccacattattaccatcgattcagtgcctggataaagaggaaagcttacttgtttaatggcagccacatgcacgaagatgctaagaagaaaaagaattccaaatcctcaacttttgaggtttcggctctccaatttaactctttggcaacaggaaacaggttttgcaagttcaaggttcactccctatatgtgattataggaattgtttgtggaaatggattaacatacccgtctatgcctaaaagataataagaaaactgaaatatgtcttcaaaaaaaaaaaaaaaaaaaaaaaaaaaaaaaaaaaaaaaaaa

SEQ ID NO: 318 - DNA, 3347 bp, Homo sapiens
atcccttggaggcattcatggctgaagtggaggatcaggcagctagagacatgaagaggcttgaagaaaaggacaaggaaagaaaaaacgtaaagggtattcgagatgacattgaagaggaagatgaccaagaagcttattttcgatacatggcagaaaacccaactgctggtgtggttcaggaggaagaggaagacaatctagaatatgatagtgacggaaatccaattgcacctaccaaaaaaatcattgatcctcttccccccattgatcattcagagattgactatccaccatttgaaaaaaacttttacaatgagcatgaagagataaccaacctcactccacagcagttaatagatctccggcataagctcaatcttcgggtctctggtgctgcacctcctagaccaggaagtagctttgctcattttgggtttgacgaacaacttatgcaccagattcggaaatctgaatacacacagcccactccaatacagtgccagggtgtgcctgtggcattaagtggtagagacatgattggtattgccaaaacaggtagtgggaaaactgcagccttcatttggcccatgttgattcatataatggaccagaaggagttggaaccaggtgatggaccaattgcagtgattgtgtgtcctaccagggagctttgccagcagatccatgcagaatgtaagcggtttggaaaagcatataatcttcgatcagtggccgtatatggaggagggagtatgtgggagcaggccaaggcccttcaggagggggcagagattgttgtgtgtaccccaggtcgactgatagatcatgtgaaaaagaaagctaccaatcttcaaagagtctcttaccttgtgtttgatgaagcagatcgaatgtttgacatgggatttgagtaccaagttcgatccatagcaagtcatgttcgtcctgacaggcagactctcttatttagtgcaacttttcggaagaagattgaaaagttggccagagacatcctgatcgaccctattcgagtggtgcagggagatattggagaggcaaatgaagatgtgacacagattgtggagattctccattctggacctagtaaatggaactggcttacccggcgtctggtagaatttacctcttcagggagtgtcctcctctttgttactaaaaaagccaatgctgaagagctagcgaataaccttaaacaggagggtcataatcttgggctgctccatggggatatggatcagagtgagagaaacaaggtcatttcagactttaagaaaaaggacatcccagtcctggtggccacagatgttgcagcccgtggtctggacattccttcaattaagactgtcattaactatgatgtggcacgagacattgatacccacacgcataggattggccgcacaggaagagcgggtgagaaaggtgtggcctataccctactcactcccaaggacagcaattttgctggtgacctggtccggaacttggaaggagccaatcaacacgtttctaaggaactcctagatctggcaatgcagaatgcctggtttcggaaatctcgattcaaaggagggaaaggaaaaaagctgaacattggtggaggaggcctaggctacagggagcggcctggcctgggctctgagaacatggatcgaggaaataacaatgtaatgagcaattatgaggcctacaagccttccacaggagctatgggagatcgactaacggcaatgaaagcagctttccagtcacagtacaagagtcactttgttgcagccagtttaagtaatcagaaggctggaagttctgctgctggggcaagtgggtggactagtgcagggagcttgaattctgttccaactaactcagcacaacagggccataacagtcctgacagccccgtcaccagtgccgccaagggcatcccaggctttggcaatactggcaacatcagtggtgcccctgtgacctacccgtctgccggagcccaaggagtcaacaacacagcttcagggaataacagccgagaagggactgggggcagcaacgggaaaagagagagatatactgagaaccggggcagcagcccgtcacagtcacggagagactggcaatcggcatagcgatagtccacgtcacggagatggtggtcgccatggagatggataccgccatccagaaagcagcagccgtcatactgatggccatcggcacggggagaacagacatggaggaagcgcaggccggcatggggagaaccggggtgcaaatgatggtcggaatggggaaagcaggaaagaagcttttaatcgtgagagcaagatggagcccaagatggaacccaaagtggacagcagcaagatggacaaggtggacagcaagacagataagacagctgacggctttgctgtcccagagccgcctaaacgcaagaaaagtcgatgggacagttagaggggatgtgctaaagcgtgaaatcagttgtccttaatttttagaaagattttggtaactaggtgtctcagggctgggttggggtccaaagtgtaaggaccccctgcccttagtggagagctggagcttggagacattaccccttcatcagaaggaattttcggatgttttcttgggaagctgttttggtccttggaagcagtgagagctgggaagcttcttttggctctaggtgagttgtcatgtgggtaagttgaggttatcttgggataaagggtcttctagggcacaaaactcactctaggtttatattgtatgtagcttatattttttactaaggtgtcaccttataagcatctataaattgacttctttttcttagttgtatggccaggcagtccccattttaggagttggcttctgcaaattcaatccattgagctaactgttggggagcaatttggtagttgtagacatttgcagggaagggagatgtctgattctaaatgggagttgatgctcaggtccccagccaggtttgcatccagccctgagacatgtaggaaacacctttcagacccaggctctgaagattcccagaagccacaaggattgaagggaaaaggtgatcctggtaactgttccaggattgctccaggtttgagatggtattgctaaatttaaaattaaacaagaaacccaacaacagcttttaaagtgtcttctatctcattgtattttttttaacttgccccaatgatagaaaagtcttttgctgaaatgattttgatgatttttgtttatcgtttataaaaaggaaaagaaatatacaaactttgacttttgtgaaaaaaaaaaaaaaaaaaaaa

SEQ ID NO: 319 - DNA, 1814 bp, Homo sapiens
ggggagatgatccgagccgcgccgccgccgctgttcctgctgctgctgctgctgctgctgctagtgtcctgggcgtcccgaggcgaggcagcccccgaccaggacgagatccagcgcctccccgggctggccaagcagccgtctttccgccagtactccggctacctcaaaagctccggctccaagcacctccactactggtttgtggagtcccagaaggatcccgagaacagccctgtggtgctttggctcaatgggggtcccggctgcagctcactagatgggctcctcacagagcatggccccttcctggtccagccagatggtgtcaccctggagtacaacccctattcttggaatctgattgccaatgtgttatacctggagtccccagctggggtgggcttctcctactccgatgacaagttttatgcaactaatgacactgaggtcgcccagagcaattttgaggcccttcaagatttcttccgcctctttccggagtacaagaacaacaaacttttcctgaccggggagagctatgctggcatctacatccccaccctggccgtgctggtcatgcaggatcccagcatgaaccttcaggggctggctgtgggcaatggactctcctcctatgagcagaatgacaactccctggtctactttgcctactaccatggccttctggggaacaggctttggtcttctctccagacccactgctgctctcaaaacaagtgtaacttctatgacaacaaagacctggaatgcgtgaccaatcttcaggaagtggcccgcatcgtgggcaactctggcctcaacatctacaatctctatgccccgtgtgctggaggggtgcccagccattttaggtatgagaaggacactgttgtggtccaggatttgggcaacatcttcactcgcctgccactcaagcggatgtggcatcaggcactgctgcgctcaggggataaagtgcgcatggaccccccctgcaccaacacaacagctgcttccacctacctcaacaacccgtacgtgcggaaggccctcaacatcccggagcagctgccacaatgggacatgtgcaactttctggtaaacttacagtaccgccgtctctaccgaagcatgaactcccagtatctgaagctgcttagctcacagaaataccagatcctattatataatggagatgtagacatggcctgcaatttcatgggggatgagtggtttgtggattccctcaaccagaagatggaggtgcagcgccggccctggttagtgaagtacggggacagcggggagcagattgccggcttcgtgaaggagttctcccacatcgcctttctcacgatcaagggcgccggccacatggttcccaccgacaagcccctcgctgccttcaccatgttctcccgcttcctgaacaagcagccatactgatgaccacagcaaccagctccacggcctgatgcagcccctcccagcctctcccgctaggagagtcctcttctaagcaaagtgcccctgcaggcgggttctgccgccaggactgcccccttcccagagccctgtacatcccagactgggcccagggtctcccatagacagcctgggggcaagttagcactttattcccgcagcagttcctgaatggggtggcctggccccttctctgcttaaagaatgccctttatgatgcactgattccatcccaggaacccaacagagctcaggacagcccacagggaggtggtggacggactgtaattgatagattgattatggaattaaattgggtacagctt

SEQ ID NO: 320 - DNA, 3132 bp, Homo sapiens
ccgcagaacttggggagccgccgccgccatccgccgccgcagccagcttccgccgccgcaggaccggcccctgccccagcctccgcagccgcggcgcgtccacgcccgcccgcgcccagggcgagtcggggtcgccgcctgcacgcttctcagtgttccccgcgccccgcatgtaacccggccaggcccccgcaacggtgtcccctgcagctccagccccgggctgcacccccccgccccgacaccagctctccagcctgctcgtccaggatggccgcggccaaggccgagatgcagctgatgtccccgctgcagatctctgacccgttcggatcctttcctcactcgcccaccatggacaactaccctaagctggaggagatgatgctgctgagcaacggggctccccagttcctcggcgccgccggggccccagagggcagcggcagcaacagcagcagcagcagcagcgggggcggtggaggcggcgggggcggcagcaacagcagcagcagcagcagcaccttcaaccctcaggcggacacgggcgagcagccctacgagcacctgaccgcagagtcttttcctgacatctctctgaacaacgagaaggtgctggtggagaccagttaccccagccaaaccactcgactgccccccatcacctatactggccgcttttccctggagcctgcacccaacagtggcaacaccttgtggcccgagcccctcttcagcttggtcagtggcctagtgagcatgaccaacccaccggcctcctcgtcctcagcaccatctccagcggcctcctccgcctccgcctcccagagcccacccctgagctgcgcagtgccatccaacgacagcagtcccatttactcagcggcacccaccttccccacgccgaacactgacattttccctgagccacaaagccaggccttcccgggctcggcagggacagcgctccagtacccgcctcctgcctaccctgccgccaagggtggcttccaggttcccatgatccccgactacctgtttccacagcagcagggggatctgggcctgggcaccccagaccagaagcccttccagggcctggagagccgcacccagcagccttcgctaacccctctgtctactattaaggcctttgccactcagtcgggctcccaggacctgaaggccctcaataccagctaccagtcccagctcatcaaacccagccgcatgcgcaagtatcccaaccggcccagcaagacgcccccccacgaacgcccttacgcttgcccagtggagtcctgtgatcgccgcttctcccgctccgacgagctcacccgccacatccgcatccacacaggccagaagcccttccagtgccgcatctgcatgcgcaacttcagccgcagcgaccacctcaccacccacatccgcacccacacaggcgaaaagcccttcgcctgcgacatctgtggaagaaagtttgccaggagcgatgaacgcaagaggcataccaagatccacttgcggcagaaggacaagaaagcagacaaaagtgttgtggcctcttcggccacctcctctctctcttcctacccgtccccggttgctacctcttacccgtccccggttactacctcttatccatccccggccaccacctcatacccatcccctgtgcccacctccttctcctctcccggctcctcgacctacccatcccctgtgcacagtggcttcccctccccgtcggtggccaccacgtactcctctgttccccctgctttcccggcccaggtcagcagcttcccttcctcagctgtcaccaactccttcagcgcctccacagggctttcggacatgacagcaaccttttctcccaggacaattgaaatttgctaaagggaaaggggaaagaaagggaaaagggagaaaaagaaacacaagagacttaaaggacaggaggaggagatggccataggagaggagggttcctcttaggtcagatggaggttctcagagccaagtcctccctctctactggagtggaaggtctattggccaacaatcctttctgcccacttccccttccccaattactattccctttgacttcagctgcctgaaacagccatgtccaagttcttcacctctatccaaagaacttgatttgcatggattttggataaatcatttcagtatcatctccatcatatgcctgaccccttgctcccttcaatgctagaaaatcgagttggcaaaatggggtttgggcccctcagagccctgccctgcacccttgtacagtgtctgtgccatggatttcgtttttcttggggtactcttgatgtgaagataatttgcatattctattgtattatttggagttaggtcctcacttgggggaaaaaaaaaaaaaaaagccaagcaaaccaatggtgatcctctattttgtgatgatgctgtgacaataagtttgaacctttttttttgaaacagcagtcccagtattctcagagcatgtgtcagagtgttgttccgttaacctttttgtaaatactgcttgaccgtactctcacatgtggcaaaatatggtttggtttttcttttttttttttgaaagtgttttttcttcgtccttttggtttaaaaagtttcacgtcttggtgccttttgtgtgatgccccttgctgatggcttgacatgtgcaattgtgagggacatgctcacctctagccttaaggggggcagggagtgatgatttgggggaggctttgggagcaaaataaggaagagggctgagctgagcttcggttctccagaatgtaagaaaacaaaatctaaaacaaaatctgaactctcaaaagtctatttttttaactgaaaatgtaaatttataaatatattcaggagttggaatgttgtagttacctactgagtaggcggcgatttttgtatgttatgaacatgcagttcattattttgtggttctattttactttgtacttgtgtttgcttaaacaaagtgactgtttggcttataaacacattgaatgcgctttattgcccatgggatatgtggtgtatatccttccaaaaaattaaaacgaaaataaagtagctgcgattggg

SEQ ID NO: 321 - DNA, 2280 bp, Homo sapiens
ccgcccgccaccagctacgccccgtccgacgtgccctcgggggtcgcgctgttcctcaccatccctttcgccttcttcctgcccgagctgatatttgggttcttggtctggaccatggtagccgccacccacatagtataccccttgctgcaaggatgggtgatgtatgtctcgctcacctcgtttctcatctccttgatgttcctgttgtcttacttgtttggattttacaaaagatttgaatcctggagagttctggacagcctgtaccacgggaccactggcatcctgtacatgagcgctgccgtcctacaagtacatgccacgattgtttctgagaaactgctggacccaagaatttactacattaattcggcagcctcgttcttcgccttcatcgccacgctgctctacattctccatgccttcagcatctattaccactgatgcacaggcgccaggccaagggggaaatgctctttgaaagctccaattattggtccccaaaagcagcttccaacgtttgccatctggatgacaaacggaagatccactaaaacgtccacgggattaacagaacgtccttgcagactgagcgatgacaccacactttgtttggacatttaaattcactctgctgaataggaggaagcttttctttttcctgggaaaacaactgtctcttggaattatctgaccatgaacttgctcttctagacaactcacatcaaagccctcactccactaatggagaatcctagccccactaatgccaagtctgtttggggattttgcctcagctatgggcttccctagagtaggtctaggggaatactcagtctgatcttttttttgtttgttttattttgttttttttgagacggagtctcgctcttcctccaaggctggagtgcagtgacgcgatctccactcactgcaggctccgcctcccgggttcccgccattctcctgcctcagcctcccgagtagccgggactacaggcgcccaccaccatgcccggctaatttagttgtatttttagtagagatggggtttcaccgtattagccaggatggtctcgatctcctgacctcgtgatccgcccgcctcggcctcccaaagtgctgggattacaggcgtgagccaccgtgcccggcctgattctcttaaaattgaagaggtgctgccaaggccttcagatctaacgcagatgcatagaccttgttcctggtacttgttcagcctgtgctggggagccgtggtcccgagttccctgggaggctgacagggtcaagccaccctgcccaccaccctcccacttcccctcccctttcctctccagcattaggattcaagggaaatctgcatgaagccaattttgagggtagacgtgtggggaaaataaatcattatacagtaagacctggggcttgaggggtggggaatggggagggaagggcatagcctgctcctccatgagtctgacatctcggaaactgagcagctgccggacgcctgggtcaggaatccaagaccccacctcttaaggactggttcctcagaaagcaccctcagggaaaaaggtgaaaacattacatccgtggattctcctgccacaaccgcattggaagaaaaggctgccgcaacatctcagcgaggagtgaaggacccatgtcccaggaaccgcgctgcgccacctgcactcacccccctcacattctcttaagcacccggtggccctccgaggctggcggaatggtggtgcccacggggttgggcaagggctcaccaggacctcaacgggcaaagttgtgcacactaaaatatcaaatcaaggtgcttggttttaaagtaaatgtttttctaaagaaagctgtgttcttctgttgacccagacgaatagggcacagccctgtaactgcacgtgccttctgtcattgggaatgaaataaattattacgagaaagggacttgtcctaactggtttgaggccttacagttttgtatctacatttttcccctcctggggtttgcggggacagggacagaactacaggagtcatgggaaagaaaattctggcttcactactgctcactgctcactttctgatcactctgatactttttttttttttttttttttgcaacctgataccttgaaaagcttctatgtgtctctccttttgttgcctggcagctgtctaggatgatcactgattactatttactaagtagccacatgcaaataaaagttgtttggtaaaatggaaaaaaaaaaa

SEQ ID NO: 322 - DNA, 1398 bp, Homo sapiens
tagatggcaacctccctatctgcccgcaggtcatagaggcgacacgtagcgtcatctgaccctgaagcaaaggcatctccactccaaagttagacaaaatgccaggaatgttcttctctgctaacccaaaggaattgaaaggaaccactcattcacttctagacgacaaaatgcaaaaaaggaggccaaagacttttggaatggatatgaaagcatacctgagatctatgatcccacatctggaatctggaatgaaatcttccaagtccaaggatgtactttctgctgctgaagtaatgcaatggtctcaatctctggaaaaacttcttgccaaccaaactggtcaaaatgtctttggaagtttcctaaagtctgaattcagtgaggagaatattgagttctggctggcttgtgaagactataagaaaacagagtctgatcttttgccctgtaaagcagaagagatatataaagcatttgtgcattcagatgctgctaaacaaatcaatattgacttccgcactcgagaatctacagccaagaagattaaagcaccaacccccacgtgttttgatgaagcacaaaaagtcatatatactcttatggaaaaggactcttatcccaggttcctcaaatcagatatttacttaaatcttctaaatgacctgcaggctaatagcctaaagtgactggtccctggctgaagggaattaacagatagtatcaaggcacgaaggaatgtgccagtatggctccctgggtgaacagcttggccttttttgggtgtcttgacaggccaagaagaacaaatgactcagaatggattaacatgaaagttatccaggcgcagagttgaagaagcataagcaagacaaaaacagagagaccgcagaaggaggaagatactgtggtactgtcataaaaaacagtggagctctgtattagaaagcccctcagaactgggaaggccaggtaactctagttacacagaaactgtgactaaagtctatgaaactgattacaacaggctgtaagaatcaaagtcaactgacatctatgctacatattattatatagtttgtactgagctattgaagtcccattaacttaaagtatatgttttcaaattgccattgctactattgcttgtcggtgtattttattttattgtttttgactttggaagagatgaactgtgtatttaacttaagctattgctcttaaaaccagggatcagaatatatttgtaagttaaatcattggtgctaataataaatgtggattttgtattaaaatatatagaagcaatttctgtttacatgtccttgctacttttaaaaacttgcatttattcctcagattttaaaaataaataaataattcatttaaaaaaaaaaa

SEQ ID NO: 323 - DNA, 1316 bp, Homo sapiens
acttctacctgctcactcagaatcatttctgcaccaaccatggccacgtttgtggagctcagtaccaaagccaagatgcccattgtgggcctgggcacttggaagtctcctcttggcaaagtgaaagaagcagtgaaggtggccattgatgcaggatatcggcacattgactgtgcctatgtctatcagaatgaacatgaagtgggggaagccatccaagagaagatccaagagaaggctgtgaagcgggaggacctgttcatcgtcagcaagttgtggcccactttctttgagagaccccttgtgaggaaagcctttgagaagaccctcaaggacctgaagctgagctatctggacgtctatcttattcactggccacagggattcaagtctggggatgaccttttccccaaagatgataaaggtaatgccatcggtggaaaagcaacgttcttggatgcctgggaggccatggaggagctggtggatgaggggctggtgaaagcccttggggtctccaatttcagccacttccagatcgagaagctcttgaacaaacctggactgaaatataaaccagtgactaaccaggttgagtgtcacccatacctcacacaggagaaactgatccagtactgccactccaagggcatcaccgttacggcctacagccccctgggctctccggatagaccttgggccaagccagaagacccttccctgctggaggatcccaagattaaggagattgctgcaaagcacaaaaaaaccgcagcccaggttctgatccgtttccatatccagaggaatgtgattgtcatccccaagtctgtgacaccagcacgcattgttgagaacattcaggtctttgactttaaattgagtgatgaggagatggcaaccatactcagcttcaacagaaactggagggcctgtaacgtgttgcaatcctctcatttggaagactatcccttcaatgcagaatattgaggttgaatctcctggtgagattatacaggagattctctttcttcgctgaagtgtgactacctccactcatgtcccattttagccaagcttatttaagatcacagtgaacttagtcctgttatagacgagaatcgaggtgctgttttagacatttatttctgtatgttcaactaggatcagaatatcacagaaaagcatggcttgaataaggaaatgacaattttttccacttatctgatcagaacaaatgtttattaagcatcagaaactctgccaacactgaggatgtaaagatcaataaaacaaataataatcataaaaaaaaa

SEQ ID NO: 324 - protein, 200 aa, Homo sapiens
MAKGDPKKPKGKTSAYAFFVQTCREEHKKKNPEVPVNFAEFSKKCSERWKTVSGKEKSKFDEMAKADKVRYDREMKDYGPAKGGKKKKDPNAPKRPPSGFFLFCSEFRPKIKSTNPGISIGDVAKKLGEMWNNLNDSEKQPYITKAAKLKEKYEKDVADYKSKGKFDGAKGPAKVARKKVEEEDEEQEEEEEEEEEEEDE

SEQ ID NO: 325 - protein, 263 aa, Homo sapiens
MFRNQYDNDVTVWSPQGRIHQIEYAMEAVKQGSATVGLKSKTHAVLVALKRAQSELAAHQKKILHVDNHIGISIAGLTADARLLCNFMRQECLDSRFVFDRPLPVSRLVSLIGSKTQIPTQRYGRRPYGVGLLIAGYDDMGPHIFQTCPSANYFDCRAMSIGARSQSARTYLERHMSEFMECNLNELVKHGLRALRETLPAEQDLTTKNVSIGIVGKDLEFTIYDDDDVSPFLEGLEERPQRKAQPAQPADEPAEKADEPMEH

SEQ ID NO: 326 - protein, 539 aa, Homo sapiens
MPENVAPRSGATAGAAGGRGKGAYQDRDKPAQIRFSNISAAKAVADAIRTSLGPKGMDKMIQDGKGDVTITNDGATILKQMQVLHPAARMLVELSKAQDIEAGDGTTSVVIIAGSLLDSCTKLLQKGIHPTIISESFQKALEKGIEILTDMSRPVELSDRETLLNSATTSLNSKVVSQYSSLLSPMSVNAVMKVIDPATATSVDLRDIKIVKKLGGTIDDCELVEGLVLTQKVSNSGITRVEKAKIGLIQFCLSAPKTDMDNQIVVSDYAQMDRVLREERAYILNLVKQIKKTGCNVLLIQKSILRDALSDLALHFLNKMKIMVIKDIEREDIEFICKTIGTKPVAHIDQFTADMLGSAELAEEVNLNGSGKLLKITGCASPGKTVTIVVRGSNKLVIEEAERSIHDALCVIRCLVKKRALIAGGGAPEIELALRLTEYSRTLSGMESYCVRAFADAMEVIPSTLAENAGLNPISTVTELRNRHAQGEKTAGINVRKGGISNILEELVVQPLLVSVSALTLATETVRSILKIDDVVNTR

SEQ ID NO: 327 - protein, 144 aa, Homo sapiens
MAFTFAAFCYMLALLLTAALIFFAIWHIIAFDELKTDYKNPIDQCNTLNPLVLPEYLIHAFFCVMFLCAAEWLTLGLNMPLLAYHIWRYMSRPVMSGPGLYDPTTIMNADILAYCQKEGWCKLAFYLLAFFYYLYGMIYVLVSS

SEQ ID NO: 328 - protein, 138 aa, Homo sapiens
MPNFSGNWKIIRSENFEELLKVLGVNVMLRKIAVAAASKPAVEIKQEGDTFYIKTSTTVRTTEINFKVGEEFEEQTVDGRPCKSLVKWESENKMVCEQKLLKGEGPKTSWTRELTNDGELILTMTADDVVCTRVYVRE

SEQ ID NO: 329 - protein, 346 aa, Homo sapiens
MFLSILVALCLWLHLALGVRGAPCEAVRIPMCRHMPWNITRMPNHLHHSTQENAILAIEQYEELVDVNCSAVLRFFFCAMYAPICTLEFLHDPIKPCKSVCQRARDDCEPLMKMYNHSWPESLACDELPVYDRGVCISPEAIVTDLPEDVKWIDITPDMMVQERPLDVDCKRLSPDRCKCKKVKPTLATYLSKNYSYVIHAKIKAVQRSGCNEVTTVVDVKEIFKSSSPIPRTQVPLITNSSCQCPHILPHQDVLIMCYEWRSRMMLLENCLVEKWRDQLSKRSIQWEERLQEQRRTVQDKKKTAGRTSRSNPPKPKGKPPAPKPASPKKNIKTRSAQKRTNPKRV

SEQ ID NO: 330 - protein, 826 aa, Homo sapiens
MEGAGGANDKKKISSERRKEKSRDAARSRRSKESEVFYELAHQLPLPHNVSSHLDKASVMRLTISYLRVRKLLDAGDLDIEDDMKAQMNCFYLKALDGFVMVLTDDGDMIYISDNVNKYMGLTQFELTGHSVFDFTHPCDHEEMREMLTHRNGLVKKGKEQNTQRSFFLRMKCTLTSRGRTMNIKSATWKVLHCTGHIHVYDTNSNQPQCGYKKPPMTCLVLICEPIPHPSNIEIPLDSKTFLSRHSLDMKFSYCDERITELMGYEPEELLGRSIYEYYHALDSDHLTKTHHDMFTKGQVTTGQYRMLAKRGGYVWVETQATVIYNTKNSQPQCIVCVNYVVSGIIQHDLIFSLQQTECVLKPVESSDMKMTQLFTKVESEDTSSLFDKLKKEPDALTLLAPAAGDTIISLDFGSNDTETDDQQLEEVPLYNDVMLPSPNEKLQNINLAMSPLPTAETPKPLRSSADPALNQEVALKLEPNPESLELSFTMPQIQDQTPSPSDGSTRQSSPEPNSPSEYCFYVDSDMVNEFKLELVEKLFAEDTEAKNPFSTQDTDLDLEMLAPYIPMDDDFQLRSFDQLSPLESSSASPESASPQSTVTVFQQTQIQEPTANATTTTATTDELKTVTKDRMEDIKILIASPSPTHIHKETTSATSSPYRDTQSRTASPNRAGKGVIEQTEKSHPRSPNVLSVALSQRTTVPEEELNPKILALQNAQRKRKMEHDGSLFQAVGIGTLLQQPDDHAATTSLSWKRVKGCKSSEQNGMEQKTIILIPSDLACRLLGQSMDESGLPQLTSYDCEVNAPIQGSRNLLQGEELLRALDQVN

SEQ ID NO: 331 - protein, 92 aa, Homo sapiens
MAYRGQGQKVQKVMVQPINLIFRYLQNRSRIQVWLYEQVNMRIEGCIIGFDEYMNLVLDDAEEIHSKTKSRKQLGRIMLKGDNITLLQSVSN

SEQ ID NO: 332 - protein, 235 aa, Homo sapiens
MDPARPLGLSILLLFLTEAALGDAAQEPTGNNAEICLLPLDYGPCRALLLRYYYDRYTQSCRQFLYGGCEGNANNFYTWEACDDACWRIEKVPKVCRLQVSVDDQCEGSTEKYFFNLSSMTCEKFFSGGCHRNRIENRFPDEATCMGFCAPKKIPSFCYSPKDEGLCSANVTRYYFNPRYRTCDAFTYTGCGGNDNNFVSREDCKRACAKALKKKKKMPKLRFASRIRKIRKKQF

SEQ ID NO: 333 - protein, 291 aa, Homo sapiens
MQRARPTLWAAALTLLVLLRGPPVARAGASSGGLGPVVRCEPCDARALAQCAPPPAVCAELVREPGCGCCLTCALSEGQPCGIYTERCGSGLRCQPSPDEARPLQALLDGRGLCVNASAVSRLRAYLLPAPPAPGNASESEEDRSAGSVESPSVSSTHRVSDPKFHPLHSKIIIIKKGHAKDSQRYKVDYESQSTDTQNFSSESKRETEYGPCRREMEDTLNHLKFLNVLSPRGVHIPNCDKKGFYKKKQCRPSKGRKRGFCWCVDKYGQPLPGYTTKGKEDVHCYSMQSK

SEQ ID NO: 334 - protein, 582 aa, Homo sapiens
ESKGASSCRLLFCLLISATVFRPGLGWYTVNSAYGDTIIIPCRLDVPQNLMFGKWKYEKPDGSPVFIAFRSSTKKSVQYDDVPEYKDRLNLSENYTLSISNARISDEKRFVCMLVTEDNVFEAPTIVKVFKQPSKPEIVSKALFLETEQLKKLGDCISEDSYPDGNITWYRNGKVLHPLEGAVVIIFKKEMDPVTQLYTMTSTLEYKTTKADIQMPFTCSVTYYGPSGQKTIHSEQAVFDIYYPTEQVTIQVLPPKNAIKEGDNITLKCLGNGNPPPEEFLFYLPGQPEGIRSSNTYTLTDVRRNATGDYKCSLIDKKSMIASTAITVHYLDLSLNPSGEVTRQIGDALPVSCTISASRNATVVWMKDNIRLRSSPSFSSLHYQDAGNYVCETALQEVEGLKKRESLTLIVEGKPQIKMTKKTDPSGLSKTIICHVEGFPKPAIQWTITGSGSVINQTEESPYINGRYYSKIIISPEENVTLTCTAENQLERTVNSLNVSAISIPEHDEADEISDENREKVNDQAKLIVGIVVGLLLAALVAGVVYWLYMKKSKTASKHVNKDLGNMEENKKLEENNHKTEA

SEQ ID NO: 335 - protein, 709 aa, Homo sapiens
MAEVEDQAARDMKRLEEKDKERKNVKGIRDDIEEEDDQEAYFRYMAENPTAGVVQEEEEDNLEYDSDGNPIAPTKKIIDPLPPIDHSEIDYPPFEKNFYNEHEEITNLTPQQLIDLRHKLNLRVSGAAPPRPGSSFAHFGFDEQLMHQIRKSEYTQPTPIQCQGVPVALSGRDMIGIAKTGSGKTAAFIWPMLIHIMDQKELEPGDGPIAVIVCPTRELCQQIHAECKRFGKAYNLRSVAVYGGGSMWEQAKALQEGAEIVVCTPGRLIDHVKKKATNLQRVSYLVFDEADRMFDMGFEYQVRSIASHVRPDRQTLLFSATFRKKIEKLARDILIDPIRVVQGDIGEANEDVTQIVEILHSGPSKWNWLTRRLVEFTSSGSVLLFVTKKANAEELANNLKQEGHNLGLLHGDMDQSERNKVISDFKKKDIPVLVATDVAARGLDIPSIKTVINYDVARDIDTHTHRIGRTGRAGEKGVAYTLLTPKDSNFAGDLVRNLEGANQHVSKELLDLAMQNAWFRKSRFKGGKGKKLNIGGGGLGYRERPGLGSENMDRGNNNVMSNYEAYKPSTGAMGDRLTAMKAAFQSQYKSHFVAASLSNQKAGSSAAGASGWTSAGSLNSVPTNSAQQGHNSPDSPVTSAAKGIPGFGNTGNISGAPVTYPSAGAQGVNNTASGNNSREGTGGSNGKRERYTENRGSSPSQSRRDWQSA

SEQ ID NO: 336 - protein, 480 aa, Homo sapiens
MIRAAPPPLFLLLLLLLLLVSWASRGEAAPDQDEIQRLPGLAKQPSFRQYSGYLKSSGSKHLHYWFVESQKDPENSPVVLWLNGGPGCSSLDGLLTEHGPFLVQPDGVTLEYNPYSWNLIANVLYLESPAGVGFSYSDDKFYATNDTEVAQSNFEALQDFFRLFPEYKNNKLFLTGESYAGIYIPTLAVLVMQDPSMNLQGLAVGNGLSSYEQNDNSLVYFAYYHGLLGNRLWSSLQTHCCSQNKCNFYDNKDLECVTNLQEVARIVGNSGLNIYNLYAPCAGGVPSHFRYEKDTVVVQDLGNIFTRLPLKRMWHQALLRSGDKVRMDPPCTNTTAASTYLNNPYVRKALNIPEQLPQWDMCNFLVNLQYRRLYRSMNSQYLKLLSSQKYQILLYNGDVDMACNFMGDEWFVDSLNQKMEVQRRPWLVKYGDSGEQIAGFVKEFSHIAFLTIKGAGHMVPTDKPLAAFTMFSRFLNKQPY

SEQ ID NO: 337 - protein, 543 aa, Homo sapiens
MAAAKAEMQLMSPLQISDPFGSFPHSPTMDNYPKLEEMMLLSNGAPQFLGAAGAPEGSGSNSSSSSSGGGGGGGGGSNSSSSSSTFNPQADTGEQPYEHLTAESFPDISLNNEKVLVETSYPSQTTRLPPITYTGRFSLEPAPNSGNTLWPEPLFSLVSGLVSMTNPPASSSSAPSPAASSASASQSPPLSCAVPSNDSSPIYSAAPTFPTPNTDIFPEPQSQAFPGSAGTALQYPPPAYPAAKGGFQVPMIPDYLFPQQQGDLGLGTPDQKPFQGLESRTQQPSLTPLSTIKAFATQSGSQDLKALNTSYQSQLIKPSRMRKYPNRPSKTPPHERPYACPVESCDRRFSRSDELTRHIRIHTGQKPFQCRICMRNFSRSDHLTTHIRTHTGEKPFACDICGRKFARSDERKRHTKIHLRQKDKKADKSVVASSATSSLSSYPSPVATSYPSPVTTSYPSPATTSYPSPVPTSFSSPGSSTYPSPVHSGFPSPSVATTYSSVPPAFPAQVSSFPSSAVTNSFSASTGLSDMTATFSPRTIEIC

SEQ ID NO: 338 - protein, 148 aa, Homo sapiens
PPATSYAPSDVPSGVALFLTIPFAFFLPELIFGFLVWTMVAATHIVYPLLQGWVMYVSLTSFLISLMFLLSYLFGFYKRFESWRVLDSLYHGTTGILYMSAAVLQVHATIVSEKLLDPRIYYINSAASFFAFIATLLYILHAFSIYYH

SEQ ID NO: 339 - protein, 196 aa, Homo sapiens
MPGMFFSANPKELKGTTHSLLDDKMQKRRPKTFGMDMKAYLRSMIPHLESGMKSSKSKDVLSAAEVMQWSQSLEKLLANQTGQNVFGSFLKSEFSEENIEFWLACEDYKKTESDLLPCKAEEIYKAFVHSDAAKQINIDFRTRESTAKKIKAPTPTCFDEAQKVIYTLMEKDSYPRFLKSDIYLNLLNDLQANSLK

SEQ ID NO: 340 - protein, 316 aa, Homo sapiens
MATFVELSTKAKMPIVGLGTWKSPLGKVKEAVKVAIDAGYRHIDCAYVYQNEHEVGEAIQEKIQEKAVKREDLFIVSKLWPTFFERPLVRKAFEKTLKDLKLSYLDVYLIHWPQGFKSGDDLFPKDDKGNAIGGKATFLDAWEAMEELVDEGLVKALGVSNFSHFQIEKLLNKPGLKYKPVTNQVECHPYLTQEKLIQYCHSKGITVTAYSPLGSPDRPWAKPEDPSLLEDPKIKEIAAKHKKTAAQVLIRFHIQRNVIVIPKSVTPARIVENIQVFDFKLSDEEMATILSFNRNWRACNVLQSSHLEDYPFNAEY

SEQ ID NO: 341 - DNA, 422 bp, Homo sapien
  misc_feature (1)...(422): n = A,T,C or G
gatganattnttncnagagagaggaagangctattcagttggatgggattaaatgcatcacaaataagagaacttagagagaagtcggaaaagtttgccttccaagcccgaagttaacagaatgatgaaacttatcatcaattcattgtataaaaataaagagattttcctgagagaactgatttcaaatgcttctgatgctttagataagataaggctaatatcactgactgatgaaaatgctctttctggaaatgaggaactaacagtcaaaattaagtgtgataaggagaagacctgctgcatgtcacagacaccggtgtaggaatgaccagagaagagttggttaaaaaccttggtaccatagccaaatctgggacaagcgagtttttaaacaaaatgactgaagcacaggaagatgg

SEQ ID NO: 342 - DNA, 472 bp, Homo sapien
  misc_feature (1)...(472): n = A,T,C or G
ctggagaaggtgtgcaggggaaaccctgctgatgtcaccgaggccaggttgtctttctactcgggacactcttcctttgggatgtactgcatggtgttcttggcgctgnatgtgcaggcacgactctgttggaagtgggcacggctgctgcgacccacagtccagttcttcctggtggcctttgccctctacgtgggctacacccgcgtgtctgattacaaacaccactggagcgatgtccttgttggcctcctgcagggggcactggtggctgccctcactgtctgctacatctcagacttcctcaaagcccgacccccacagcactgtctgaaggaggaggagctggaacggaagcccagcctgtcactgacgttgaccctgggcgaggctgaccacaaccactatggatacccgcactcctcctcctgaggccggaccccgcccaggcagggagctactgtgagtccag

SEQ ID NO: 343 - DNA, 139 bp, Homo sapien
gtcctgggccttccccttccctcaagccagggctcctcctcctgtcgtgggctcattgtgaccactggcctctctacagcacggcctgtggcctgttcaaggcagaaccacgacccttgactcccgggtggggaggtgg

SEQ ID NO: 344 - DNA, 235 bp, Homo sapien
ctgcgggctcagcacagtagacatgactgggatccccaccttggacaacctccagaagggagtccaatttgctctcaagtaccagtcgctgggccagtgtgtttacgtgcattgtaaggctgggcgctccaggagtgccactatggtggcagcatacctgattcaggtgcacaaatggagtccagaggaggctgtaagagccatcgccaagatccggtcatacatccacatcagg

SEQ ID NO: 345 - DNA, 458 bp, Homo sapien
ctgtaaggtgctattcagtcctgtgacccttattttggaatgctcttcattactgttgctctgttttgtgacttcctgggaaaccgcctactttggtgtggtgtcaccttgagctgtgcacataggacaccagttttgacttaacctaacaggcagtttttatctctagctttttcaagccaggtattgagcagtttcttggccaatggcctgagaaaccacctgtccctgtcaaggggtgattttattggttttaagtggggaagtaatcccatgtacttatttcttaaatacctaggaagttcttcttggtggctcctcttggccctcccctctttctcccccaacccaccatcctgcaaggcaaggaatggcctctccctccacagaggcaacggctgcagagggagcactgtggctgccatcccagttcctcttcaaagccaaacagacacgcg

SEQ ID NO: 346 - DNA, 525 bp, Homo sapien
  misc_feature (1)...(525): n = A,T,C or G
ccagagcacaacgcctcaccatggactggacctggaggatnntcttnnnggtggcagcagccacaggtgtccactcccaagcccaacttgtgcagtctggggctgaggagaagaagcctggggcctcagtgactatttcttgtaaggcttctggatatatncttactaaatatactttacattgggtgcgccaggccccccccggacaaagacctgaatgggtgggatggatcaacactggcattgataccgttaaatattcacagaagtttcaggacagagtctccattacctgggactcatccgcgaccacagnctacctgnanntgagtagcctggaatccgaagacacggctgtgtattactgtgcgagacttanggcccgttcgctgtggtgggacttaatgacgcttttgacatctggggccaagggacagtggtcaccgtctcttcanggagtgcattcgccccaacccttttccccctctctcctgtgaagaattccccgncggatacgagcagcgt

SEQ ID NO: 347 - DNA, 423 bp, Homo sapien
ccagacgctgacttgtttctgagtccttaagcaggaaggatttgaaatcctggagcttggcagtcttgctcttcacctctaagccaatgttgaccccttcatctataaagtccacaactctccggaagtcatcctcacggaactgtcgagaagttaaggctggggccccaagccgcaggccgcccggtgtgatggcacttcggtctccaggacaggtgttcttgttggcagtgatggatacaagctctagcacccgctcagcccgagctccatccaggcccttgggccgcaggtccaccagcaccaggtggttgtcagtaccacctgataccagtgagtagcctcgctctagcagggcatctgccatggcccgagcattcttcagaacctgcagggagtactcccggaacatgggggtgcagg

SEQ ID NO: 348 - DNA, 513 bp, Homo sapien
cctctaggcctgatgctctcagaggcaatagaagaaaagtaaaaggaaggtctcacttcacagacaatgaaaccctcctaaccctcttccccactacccacaactccctacactgccaatctaaataaaaagaggacaatgcatgagtgtgagatacacatacacacacacacatacacacacacacacgcacagcttcctttcagccaaagaactgcaaaatccttccccggaaggaggacaactggcaacaccaatcaaggcttggtggtctaaggtgatggctggaatcatgtgagactggtaaaaatccagggagaaaatgtttcaccttcagctcattcccaagtctctatgaagcccgccccacttccacataggggaactgtggctctgggggcagcctctgcagctactcagaataggtgggaggaggggctggctttgaggctgccttagccatgaggctctttgcctaggaatagctggagatgggagctgcagggggctcag

SEQ ID NO: 349 - DNA, 231 bp, Homo sapien
ccttatttctcttgtcctttcgtacagggaggaatttgaagtagatagaaaccgacctggattactccggtctgaactcagatcacgtaggactttaatcgttgaacaaacgaacctttaatagcggctgcaccatcgggatgtcctgatccaacatcgaggtcgtaaaccctattgttgatatggactctagagtaggattgcgctgttatccctagggtaacttgttcc

SEQ ID NO: 350 - DNA, 341 bp, Homo sapien
ctgcccaagggcgttcgtaacgggaatgccgaagcgtgggaaaaagggagcggtggcggaagacggggatgagctcaggacagagccagaggccaagaagagtaagacggccgcaaagaaaaatgacaaagaggcagcaggagagggcccagccctgtatgaggaccccccagatcagaaaacctcacccagtggcaaacctgccacacccaagatctgctcttggaatgtggatgggcttcgagcctggattaagaagaaaggattagattgggtaaaggaagaagccccagatatactgtgccttcaagagaccaaatgttcagagaacaaactaccag

SEQ ID NO: 351 - DNA, 256 bp, Homo sapien
ggcgttggggacggttgtaggacgtggctctttattcgtgagttttccatttacctccgctgaacctagagcttcagacgccctatggcgtccgcctcgacccaaccggcggccttgagcgctgagcaagcaaaggtggtcctcgcggaggtgatccaggcgttctccgccccggagaatgcagtgcgcatggacgaggctcgggataacgcctgcaacgacatgggtaagatgctgcaattcgtgctgcccgtgg

SEQ ID NO: 352 - DNA, 368 bp, Homo sapien
  misc_feature (1)...(368): n = A,T,C or G
cctttcttgtaagtgaagaanaaggaatgcagcaaagaagagttcgacattggagtccttagttccatcaggatcccattcgcagcctttagcatcatgtagaagcaaactgcacctatggctgagataggtgcaatgacctacaagattttgtgttttctagctgtccaggaaaagccatcttcagtcttgctgacagtcaaagagcaagtgaaaccatttccagcctaaactacataaaagcagccgaaccaatgattaaagacctctaaggctccataatcatcattaaatatgcccaaactcattgtgactttttattttatatacaggattaaaatcaacattaaatcatcttatttacatgg

SEQ ID NO: 353 - DNA, 368 bp, Homo sapien
ctgaggggtggcagtaagcaatgaggatgggctataaagctgttaactggctaagggccatccttgggcaggcatttcagacacatctgtagagagggcagtagcatctccgataggccagctctgaaggaagcttaatgcttaatacagtcacactgcataaattagcttagaatgctctcttgggtaaaaaatattaatagtgtatatgcacttgaagagcaaaattcctcaagaaaaaaagtttaatagcaaggagtttccatcagtcccggtctttgtgaggattaccacaacaaacacttaaaaggatacaacaggtacttattaaatgctgccttgccttttacctcttccttttttttttt

SEQ ID NO: 354 - DNA, 380 bp, Homo sapien
ccatggcttctcacccagacagtctttctgggcaacttggggaagcccctgttctgctcaagtctcaccccatggaagaggtgggggaagggggccttggtttttcaggaagacaggttggagagcacgagtcactacaaagcagtaaaagtgaatggtgtctccaggggctgggtccagaacaccacggagagccccagccataaaggtgtgttccgcctctggcctgcaggaatctctttgaatctctttgattggtggctccaagagcaatgggaagtcaacagccaggaggctggactgggttccctgggaccccgaggtcccagagctgctgggcagtggttgtcggcaaagaagaaaggtccaagagggtcagg

SEQ ID NO: 355 - DNA, 347 bp, Homo sapien
ccagtggaggggtgggggtatcgatcccgccgggggctggcttggttgctggtgccctgagcccttctctgcccgcctgggtgttgccttcactgatggaggtaggcgtccagccagatgtcaccagacttcttcggggacctgacgatgtccaccagcgcggtgaggaagggcttcacttcgtagctgaggccgtgcttggcacacagcgacttgaccagcggggccacccggctgtagttgtgtctcggcatcctggggaagaggtggtgctcgatctggaagttgaggtgcccgctgaaccagttggtgaaaagtgagggctccacgttgcaggtggctgccag

SEQ ID NO: 356 - DNA, 157 bp, Homo sapien
cctggagctgctgaagactgctattgggaaagctggctacactgataaggtggtcatcggcatggacgtagcggcctccgagttcttcaggtctgggaagtatgacctggacttcaagtctcccgatgaccccagcaggtacatctcgcctgaccag

SEQ ID NO: 357 - DNA, 323 bp, Homo sapien
ccatacagggctgttgcccaggccctagaggtcactcctcgtaccctgatccagaactgtggggccagcaccatccgtctacttacctcccttcgggccaagcacacccaggagaactgtgagacctggggtgtaaatggtgagacgggtactttggtggacatgaaggaactgggcatatgggagccattggctgtgaagctgcagacttataagacagcagtggagacggcagttctgctactgcgaattgatgacatcgtttcaggccacaaaaagaaaggcgatgaccagagccggcaaggcggggctcctgatgctgg

SEQ ID NO: 358 - DNA, 555 bp, Homo sapien
aaaaggtttctaaaacatgacggaggttgagatgaagcttcttcatggagtaaaaaatgtatttaaaagaaaattgagagaaaggactacagagccccgagttaataccaatagaagggcaatgcttttagattaaaatgaaggtgacttaaacagcttaaagtttagtttaaaagttgtaggtgattaaaataatttgaaggcgatcttttaaaaagagattaaaccgaaggtgattaaaagaccttgaaatccatgacgcagggagaattgcgtcatttaaagcctagttaacgcatttactaaacgcagacgaaaatggaaagattaattgggagtggtaggatgaaacaatttggagaagatagaagtttgaagtggaaaactggaagacagaagtacgggaaggcgaagaaaagaatagagaagatagggaaattagaagataaaaacatacttttagaagaaaaaagataaatttaaacctgaaaagtaggaagcagaagaaaaaagacaagctaggaaacaaaaagctaagggcaaaatgtacaccac

SEQ ID NO: 359 - DNA, 549 bp, Homo sapien
ctgccaggctgaaaagaagcctcagctcccacaccgccctcctcaccgcccttcctcggcagtcacttccactggtggaccacgggcccccagccctgtgtcggccttgtctgtctcagctcaaccacagtctgacaccagagcccacttccatcctctctggtgtgaggcacagcgagggcagcatctggaggagctctgcagcctccacacctaccacgacctcccagggctgggctcaggaaaaaccagccactgctttacaggacagggggttgaagctgagccccgcctcacacccacccccatgcactcaaagattggattttacagctacttgcaattcaaaattcagaagaataaaaaatgggaacatacagaactctaaaagatagacatcagaaattgttaagttaagctttttcaaaaaatcagcaattccccagcgtagtcaagggtggacactgcacgctctggcatgatgggatggcgaccgggcaagctttcttcctcgagatgctcttgctgcttgagagctattgctttggt

SEQ ID NO: 360 - DNA, 289 bp, Homo sapien
tttaaattttactagtgttacttaatgtatattctaaaaagagaatgcagtaactaatgccctaaatgtttgatctctgtttgtcattactttttcaaaattatttttttctgtaaagtataatatataaaacttcttgcttaaattgaatttctatattagtggttaattgcagtttattaaagggatcattatcagtaatttcatagcaactgttctagtgttttgtgtttttaaaacagaattaggaatttgagatatctgattatatttttcatatgaatcacag

SEQ ID NO: 361 - DNA, 311 bp, Homo sapien
ctgttcagtatggcaaagggcagacttactccttcatccactctgctgccttgatgaggtgaacacactggaataagatggagggcaggatacctgccaaagcctgaggaatgagatgatctgaaacaattgggcaaaggctggacatttcaaaaagctgacttccaactgcagtttatgggtatagaatttgatgcttccctcaagtcctgactgctctttctgaggcagccaggctaggccaagaaatgagctgctccagcttctccagagcacagcagcctcccagggcctgtcagcatctgcagcag

SEQ ID NO: 362 - DNA, 496 bp, Homo sapien
  misc_feature (1)...(496): n = A,T,C or G
ccagtttctaaaanaatgcacatttaaagagaagcatctaccacggctttaaaacaaaacaactctgagatgaacaatatgtgttatactcagagattaacaatctcaatcatacatactgattctttcagacatttaataaccactacatttttttgcattaatgaagtttgactatatgtgtaaagggactaaatatttttgcaacagcctgttctttgttcattcttttctggatagcgtgtcctctgtattgcggtagatttatacattctgttgcctaaatatgtgtgtaaaatgagctgataaactggagtactacttaaaaaaaagtctgtgatttataagatgcatatgctttctatgtgaatataagcttgtgcacaatgtttaaaagaaaaacaatgaattagaagagatcccccgtcccccagtctgacatatttcatacagaatgtttaaaagaaaaactctgctagtcttggcaaacatttgg

SEQ ID NO: 363 - DNA, 673 bp, Homo sapien
  misc_feature (1)...(673): n = A,T,C or G
ccaagagggagataanacaaacttctcaaacaaaaagaaaagaaaaacgaatgattcatctgctttaatcagtgtgattaatgcagcacccattgccccgggaaccgtttctgctgtactatctggatactaaaatgttacggaagtagctctttgttctccctcactctgcccttagttaatagaaattcagactcgccaagtaaggctttgtgcatagtgtcttcatgtcgcgtatagttgagcgcgttcttagcagttggcttcatggacagctcattagtgttttgacttttcttacccagcgttaattgaattcttgcttttagacaacttcctttttgtagtggtgaaccttgccctttagtacagttcaagtgaatctggataattgttcatctttgctttagcttagataccatgtagtggtctgtggctacaggaagctggttctgtctgcttccacagtctgcttaaaaaactgtctgacttcgtgaatatagagaccaagtttaccacttctgatgaagagaccaattaagattcattcctcattctgtttctttccagtgggagaagagtccccatgaaataagatgaaactgattccatgcactagtacatgtaggcttctcccttgcgcaaagcttaacaatttgtaggaaactttggg

SEQ ID NO: 364 - DNA, 495 bp, Homo sapien
  misc_feature (1)...(495): n = A,T,C or G
ccaaatgtttgcncaagactagcagagtttttcttttaaacattctgtatgaaatatgtcagactgggggacgggggatctcttctaattcattgtttttcttttaaacattgtgcacaagcttatattcacatagaaagcatatacatcttataaatcacagacttttttttaagtagtactccagtttatcagctcattttacacacatatttaggcaacagaatgtataaatctaccgcaatacagaggacacactatccagaaaagaatgaacaaagaacaggctgttgcaaaaatatttagtccctttacacatatagtcaaacttcattaatgcaaaaaatgtagtggttattaaatgtctgaaagaatcagtatgtatgattgagattgttaatctctgagtataacacatattgttcatctcagagttgttttgttttaaagccgtggtagatgcttctctttaaatgtgcattttttagaaactgg

SEQ ID NO: 365 - DNA, 291 bp, Homo sapien
aactgacaagcccttgcgcctgcctctccaggatgtctacaaaattggtggtattggtactgttcctgttggcccgagtggagactggtgttctcaaacccggtatggtggtcacctttgctccagtcaacgttacaacggaagtaaaatctgtcgaaatgcaccatgaagctttgagtgaagctcttcctggggacaatgtgggcttcaatgtcaagaatgtgtctgtcaaggatgttcgtcgtggcaacgttgctggtgacagcaaaaatgacccaccaatggaagcag

SEQ ID NO: 366 - DNA, 277 bp, Homo sapien
ctggatggtgcctcagaaggtgcattctgcttctgcaggggcttgaaacaccaaggcactccagggatcctggagtcaaagcagcagccccggttgttgcactccttgggggtgacatgggggtagcccgcagtccaccctgtccttggctggcacggcacactggtttgcagacaggcccacgtactcctcagcagagctggaggacaagcaaggccaggaccagccccagcatgcagagcgctctggcagccatgaccaccgtgggctccgggac

SEQ ID NO: 367 - DNA, 311 bp, Homo sapien
ccagagctgcggggcctcagtacacggagctgttccggatgccacagcacagcaccatgctcaggatcatctcgaagatcatgatcacagcgaccacgatggcagcaatgccgatgaggtacagcttcccggagaagaggtcatcgatcttctggtggcagtcctccttgaagaggttgctgatgatgttgctgcccgagggacacaaattgttcttgagcactgaggtggtcaaagcagtcagtgtgctggagccacagcagtcaagcgtctcgtggaaggtcttcaccacagccttggcgttgttggcg

SEQ ID NO: 368 - DNA, 384 bp, Homo sapien
ccaaaggggtctctagctgctgctctgctgctcctgctcatggatgagtttggcgatggggccggtgatgccgcctatcaaggtccagtactcatcgaagctgatgcgcccatcaggattggcatccaggttctggatgagcttatccgcagccttccggttccctgtgtccgacagcatgtggttcagctctttctggagcatctcgcggaagctgctcttgctgatcttgttcttgaccaggctgtacctagacacatatttgtagaagttttccaccaggacaatgactgccttctccagctccgtgtagcaagtctgacatctccctgcttcgcctgctggcggggcctaaggcgggggccaagcccagttacagcccag

SEQ ID NO: 369 - DNA, 216 bp, Homo sapien
ccaagtgccaggtggctttcagcagcttcctacgatcagccgaagaaagcagaagctctggaggctgccatcgagaacctcaatgaagccaagaactattttgcaaaggttgactgcaaagagcgcatcagggacgtcgtttacttccaggccagactctaccataccctggggaagacccaggagaggaaccggtgtgcgatgctcttccggcag

SEQ ID NO: 370 - DNA, 561 bp, Homo sapien
ctggctccttcttttgtggtcgtttgggggatgggctggtttggggtttaggtgcagagaatggtttggggccactgcgtactggaccactctgagccttcagggcagggttcttgtgagtcttcatgtcatcagatacatgtttcagggcatgtgtaatgctctccccctgattaatctgcgcgaacagtgctgagcgggaagcagactcatctgagcctgaactggtagagactgggggaggaggggggcctggtggagggggaggaggacctgatccggcagagggtccagatggcagtccgctcagttcttttgccacaggccccgttttgctccaggccagtccggtggtatggaactccttaatgtaagcctgcagctctgtccatatacttaaataagctttgacccagtctacatgcttcttatccacatctttgtactctttgaggactcggtttgtataaaacatggcggcatcattcatttctttcgcataagggccaggcttgggagccatagccacccagcccagggcctggatactttcgctgacag

SEQ ID NO: 371 - DNA, 518 bp, Homo sapien
cccacttccatcgctctctggtgtgaggcacagcgagggcagcatctggaggagctctgcagcctccacacctaccacgacctcccagggctgggctcaggaaaaaccagccactgctttacaggacagggggttgaagctgagccccgcctcacacccacccccatgcactcaaagattggattttacagctacttgcaattcaaaattcagaagaataaaaaatgggaacatacagaactctaaaagatagacatcagaaattgttaagttaagctttttcaaaaaatcagcaattccccagcgtagtcaagggtggacactgcacgctctggcatgatgggatggcgaccgggcaagctttcttcctcgagatgctctgctgcttgagagctattgctttgttaagatataaaaaggggtttctttttgtctttctgtaaggtggacttccagcttttgattgaaagtcctagggtgattctatttctgctgtgatttatctgctgaaagctcag

SEQ ID NO: 372 - DNA, 335 bp, Homo sapien
ctggaggctgggtgcaccctgcccagatccacacctgtaccccggcggaaaggctcatgggcattgaagacggtggtgaaaaagccaaagggaaaagcaccaacaccaaatgagaagtggaagcccccggtatcaccaaatggctggaatccccctctgctctccggagctggtctctggccctgggggcggggtggagtttttaatctgggatcctggggcttctggctccctcgcccataaagcgggacaaccttctctctgctgatcccagctttacatactggacactcttgccgttctggccgtgtctccagccactgatgaagacatgg

SEQ ID NO: 373 - DNA, 467 bp, Homo sapien
ccactagctgaatcttgacatggaaggttttagctaatgccaagtggagatgcagaaaatgctaagttgacttaggggctgtgcacaggaactaaaaggcaggaaagtactaaatattgctgagagcatccaccccaggaaggactttaccttccaggagctccaaactggcaccacccccagtgctcacatggctgactttatcctccgtgttccatttggcacagcaagtggcagtgtctccaccacctatgatggtgatgcagcccctagaagtggctttcaccacctcatccatgagagctttggttccccgggcaaaagcttcccattcaaatacccccacaggaccattccacacaatctgcttagcccgagtgacagcctcagcatacttcttgctgctttcaggaccacagtccaagcccatccagccagcaggtacgccagaagccacagtggcttgg

SEQ ID NO: 374 - DNA, 284 bp, Homo sapien
tttccgtaaaagcgtgtaacaagggtgtaaatatttataattttttatacctgttgtgagacccgaggggcggcggcgcggttttttatggtgacacaaatgtatattttgctaacagcaattccaggctcagtattgtgaccgcggagccacaggggaccccacgcacattccgttgccttacccgatggcttgtgacgcggagagaaccgattaaaaccgtttgagaaactcctcccttgtctagccctgtgttcgctgtggacgctgtagaggcaggttgg

SEQ ID NO: 375 - DNA, 307 bp, Homo sapien
cctactcttctccgtccattgtactatctgcccgtggtggggatggcagtaggatcatatttgatgacttccgagaagcatattattggctccgtcataatactccagaggatgcgaaggtcatgtcctggtgggattatggctatcagattacagctatggcaaaccgaacaattttagtggacaataacacatggaataatacccatatttctcgagtagggcaggcaatggcgtccacagaggaaaaagcctatgagatcatgagggagctcgatgtcagctatgtgctggtcatttttggagg

SEQ ID NO: 376 - DNA, 650 bp, Homo sapien
  misc_feature (1)...(650): n = A,T,C or G
ccattgnctnctnacgtgatgtcatcatctgccaggtcatcttggcaaaagtcggagcatttctcagtcactgcaaagtagcccttctcgttggagcaccggaagagacgtgtgtgtttcatgtactcggcatcgtcatcatagggcttctgtgccccaatgcccacccagaagaagttctcaggctcctcaccttcgttgataacctgcttgctgtaggaggtgtcaaacatggtgttcaggatgtcttctgccaacttggcttcgtcagggtctgatgcccggcccacccaggcatacacgatgccctggttgtcctcactctcaaagggaaccttgaggatgaagcagaactcggagttgaggaggctggagtcggtgttgatctggatgcaccgggtgcagagggcgctgccgttggtgcggatctggtagaggctgggctgttgggcgccctggaccgccttcctcttgccccggtggatgatgaacttcctcttgaaatgggacaggaacttggggttctcctgctgctgcgtcatgcgtaccacctccagcttcccagggaagaggctctcgaacttcttttgcaggctgaaggtgaaggtgacccacccatattgggaggctttcacggccctgccagaagt

SEQ ID NO: 377 - DNA, 306 bp, Homo sapien
  misc_feature (1)...(306): n = A,T,C or G
tctagatgcatgctcgagcggccgccagtgtgatgganatctgcagaattcgcccttcgagcggccgcccgggcaggttcgggtgctgccttcacctgccaggcccttccccgctagcttggggcgagcagagctgcgtccagtggaactaaagccgttccaggattatcaaaaactgagcagcaaccttgggggacctggatcatcacggactcccccaactggaaggtccttctctggcctcaattcccgtctcaaggccacgccttccacctacagtggagtcttccgcacccagcgcgtcga

SEQ ID NO: 378 - DNA, 199 bp, Homo sapien
  misc_feature (1)...(199): n = A,T,C or G
ccacangtggcacttgggtgtggctcctctgttatttgtcctcatgtgagaaagcagatcatctccaaatcttgccatttgtatacttttggtggagacttggatgtcatatcttctttgttttgggttttcttccctagcttattttgtggcttttaaagaagtggattgtattgtgagatcctgtgattcctggtgg

SEQ ID NO: 379 - DNA, 216 bp, Homo sapien
  misc_feature (1)...(216): n = A,T,C or G
ccagggcangtcatcaagaggggcattgtcttgcatgcggcctgccgtgtccaccagcaccacgtcaaagccttggttacgtgcaaaagcaatggcttccatggcaatgccagcagcatccttgccatagcccttttcaaacaactgcaccatggtgcggccaccatgcttctctggagggtgtagggcactcaaacgccgggtgtgtgtacgcag

SEQ ID NO: 380 - DNA, 555 bp, Homo sapien
ccatgggccttcctttccactaaaaggaattccgaacagcaaaaagaaggtcttgagatagtgaaaatggtgatgatatctttagaaggtgaagatgggttggatgaaatttattcattcagtgagagtctgagaaaactgtgcgtcttcaagaaaattgagaggcattccattcactggccctgccgactgaccattggctccaatttgtctataaggattgcagcctataaatcgattctacaggagagagttaaaaagacttggacagttgtggatgcaaaaaccctaaaaaaagaagatatacaaaaagaaacagtttattgcttaaatgatgatgatgaaactgaagttttaaaagaggatattattcaagggttccgctatggaagtgatatagttcctttctctaaagtggatgaggaacaaatgaaatataaatcggaggggaagtgcttctctgttttgggattttgtaaatcttctcagggtcagagaagattcttcatgggaaatcaagttctaaaggctttgccccaagagatgatgaggcag

SEQ ID NO: 381 - DNA, 406 bp, Homo sapien
ctgcaccaggtgggcctctaggtcccattaagcccattggtccagggccaagtccaactccttttccatcatactgagcagcaaagttcccaccgagaccaggggggccaggaggaccaggtggaccaggagggcctgtgggaccatcttcaccatctctgcctggggggcctggtggacccctttctccacgtggtcctctatctccggctgggccctttcttacagtttcctcttgtaaagattggcatgttgctaggcataaggttactgcaagcagcaacaaagtccgcgtatccacaaagctgagcatgtctagcacttagacatgcagactccttgtgtcgcagagcccctgggtcaccggcggaggtatcacctggcgggcgcgggcatgcagtcgtgg

SEQ ID NO: 382 - DNA, 528 bp, Homo sapien
  misc_feature (1)...(528): n = A,T,C or G
ctgagcagtttgtgggtntntcttcccgcaagtttcaggaagtattcacaaaagaaaaatacattttttcccccaggggtggggcaaggacagtggagagagtgctaggaaatgagtcccctgggaaaggggaccgggccgtgatgttaaatatctccggctcccaagtgactggatttgcctaggaccttcagaccaacagacttcagaccctcagacctgccccggggccaggtggagaaagtgagggccgtacaaggaagtgaaattctgagttgttggggctaagcctgaccccctctccatgctccccgccccaacccactctggcctcagtagatttttttttcagttgtggttgttgcccaggctggagtgcagtagcgccatcttggctcactgcacctccaccttccgggctcaagcgattctccagcctcagcctcctgagtagctaggactgcaggtgctccaccacgcccggctaatttttgtatttttagtagagatggggtttccccatgttgg

SEQ ID NO: 383 - DNA, 335 bp, Homo sapien
  misc_feature (1)...(335): n = A,T,C or G
ccatnttgagtctactcctgcgtcttgtgccctagcaccccgagaaccgtcagtttgagccagatggaagctgagctgaacacattacgatggatgatggaaacataagactatcaagaaatccaagtggtaatgggcgaagtttattcagcatccggcaatggacttatcgtagttggggaaacgggtgttccgaataatatcctggaagttatcaggacacctattttaaatataggcctgaattttgtaaagtaatatttaaggtggtccgtgataattaaataaaatgcttaattcatgtggcgaaaaaaaaaaaanaaaaaaaaaaaaaa

SEQ ID NO: 384 - DNA, 333 bp, Homo sapien
agtccaatacggctattggggttgtagcagctttcagaggaaattagtggtctgggcttgcctccagctccccaggggcagccccagtagctacactgtccagacagcacaagaccaggctggtgtcacgtccatccgagcgctgcctcagggatcgataaagtttcactgcagaaagtctccactgcggtatgctgacatctgccctgaaccttcaccctacagcattacaggctttaatcagattctgctggaaagacacaggctgatccacgtgacctcttctgccttcactgggctggggtgatccttggtgcctttgtttccacaagg

SEQ ID NO: 385 - DNA, 343 bp, Homo sapien
ctgtgacacctcaggttgaaagggtcttcctccttgaacacccaccgaggggcctggagcaacagccagccgatatggacttctagctgcaccgggtcactgagggtggagaggtttgtctggcacctgtactctccactgtcgtcgactgtggcagcgtcaatgaagtagctcgaggcctggcttgagatgaggctctcattgtgaaaccactgtgtggaattgtcctcaggggagtaggctccctggcacttcagagtcacactgtccttctcgagcaccctgtaccattgaggctccaggaacaccacagcctttgggagatcttcagtccgcatgccaa

SEQ ID NO: 386 - DNA, 244 bp, Homo sapien
tattctttgattcttggcaaataggtgagagaactaatagcaaccaggcaactgaggacgaagtcaaaaagtcggtaacagaagaatggaatcagccaacccacttgataagaaattgctccataaaccagcattgaactgattataaacataagaacagagacggcaaaaagaacacaggcattatcagccattctctcagacgaatagtaattaccgatgacttcatactgaatgttgacag

SEQ ID NO: 387 - DNA, 504 bp, Homo sapien
atctggagtccagcctcagggatgcgctactttccattctctgcattgaacattcgttctgtcagcatccgctccagcttcactgcatcagcggcaaacttgcggatcccgtcagagagcttctccacagccatctggtcctcgttgtgcaaccaacggaaagacttctcatccaggtggattttttccaggtcactggcttgggccgccttggctgagagcacaggcaccagcttggcgttgtcctgcagcagctctcccaggagcttgggtgggatggtgaggaagtcacagccggccagtgctttgatctcgcccgtgttgcggaaggaggcgcccatgacaatggttttgtagctaaacttcttgtagtagttgtagattttagtgacactctttaccccagggtcttccaggggctcataggatttcttgtcggtgtttgccacatgccaatcaaggatgcgcccaacaaatggggagatgagggtcacacccgcctcg

SEQ ID NO: 388 - DNA, 450 bp, Homo sapien
  misc_feature (1)...(450): n = A,T,C or G
gccaaagtgctgcntgaattccactcccttggttttcgcctgcccagcgttgctgtttgcgtggagggtggggggagctcagtggcagggaatcagcggtccgtggggtcgtggggacgggaacatgtgcccgaccgctccatcccctcctcctccttaggatgcataacctaccttgtctttttttttttaaattttntttccaggtanagtagctntttgtacataaanaatacttgaaaaattaattgtatgatgtatgaaaanacanagtctcctagttttgtatnttgttgtatgactgccatgagttccaccaaaaagccactntattttggtctntgtgacattttaaatgcgtgacaaaagtgagcaaataaagngaggaanaaatntatntatganataatatanattgtattgaaatctaaaaaaaaaaaaaaaaaaaaa

SEQ ID NO: 389 - DNA, 297 bp, Homo sapien
cctgcacttgaacatggctttggttttaagcaacttctctaccctgaccctcctcctgggacagcgtttcgggaggtttcttggcctcactgagagggatgtggagctgctgtaccccgtcaaggagaaggtattctacagcctgatgagggagagcggctacatgcacatccagtgcaccaagcctgacaccgtaggctctgctctgaatgactctcctgtgggtctggctgcctatattctagagaagttttccacctggaccaatacggaattccgatacctggaggatggagg

SEQ ID NO: 390 - DNA, 223 bp, Homo sapien
ctgggctggagagttggtgctggcaaaacagtccttcccctggggccggttcttacccaggtccagagaaaccaacgcgggatgtcagacttcaccaaaaggactttctggttgcccctggctggcttcctggaggcgttcgcctctagtttctcagggatggagcgagagcccagccagagaacagtaagaggagctgctctcctatctgcactcacccagg

SEQ ID NO: 391 - DNA, 365 bp, Homo sapien
ctgaggaagaaatgaaaaaagaccctgtccctcatggcccgcccactggcctcctgtgaactctgtcctgttgccaaccccagatgaagtcagccaaaaagtgctttccacatcctctctctggggctgcccagcctgaccgtaggggatccactggcagagccaaggtggatgctggtgcctgaagctggaagccagcaggacatgagacccctcctgtagcaggaagtggttctagaactcccagcagaacagaacggaaaaggagctgattggggatagaatgagttctgctaaacagccagatgctctgagagaggtgacactggactgtctcggaggtgtgtgcagatggctacaggtgg

SEQ ID NO: 392 - DNA, 302 bp, Homo sapien
  misc_feature (1)...(302): n = A,T,C or G
ccaagagctacaatgagcagcgcatcangacagaacgtgcaggtttttgagttccagttgactgcagaggacatgaaagccatagatggcctagacagaaatctccactattttaacagtgatagttttgctagccaccctaattatccatattcagatgaatattaacatggagagctttgcctgatgtctaccagaagccctgtgtgtggatggtgacgcagaggacgtctctatgccggtgactggacatatcacctctacttaaatccgtcctgtttagcgacttcagtcaactacag

SEQ ID NO: 393 - DNA, 213 bp, Homo sapien
  misc_feature (1)...(213): n = A,T,C or G
ccaataatcaagnacaaanactggatttgaggatggatcagttctgaaacagtttctttctgaaacagagaaaatgtcccctgaagacagagcaaaatgctttggaaagaatgaggccatacaggcagcccatgatgccgtggcacaggaaggccaatgtcgggtagatgacaaggtgaatttccattttattctgtttaacaacgtggatgg

SEQ ID NO: 394 - DNA, 334 bp, Homo sapien
cctacccataatccagagaggcttgcccagaggaggactacgtgggggacgtgccaccagaaccctacttgggggcgggatgtcactccgaggtcaaaacctgctccgaggtggacgagccgtagctccccgaatgggcttaagaagaggtggtgttcgaggtcgtggaggtcctgggagagggggcctagggcgtggagctatgggtcgtggcggaatcggtggtagaggtcggggtatgataggtcggggaagagggggctttggaggccgaggccgaggccgtggacgagggagaggtgcccttgctcgccctgtattgaccaaggagcag

SEQ ID NO: 395 - DNA, 174 bp, Homo sapien
ccagatgaggaaaaaaattaggaaggagatgaagttttccaaatttcatggtatatgctgcacttccccaaccttcactctccatgtagcctactgggtctactattccacaaagtggctcaacctccaaatgacctctggtttacccctattaaaatcccaaaggactttcag

SEQ ID NO: 396 - DNA, 140 bp, Homo sapien
  misc_feature (1)...(140): n = A,T,C or G
ctgcaaagccttgtgtaacnttctccagcatttggacccagtacgtgaaagcccacaacacgttcattgtctttagtattacagattatttttgcataacatttgttgttatctcttgacggaatcgtccattccaatgg

SEQ ID NO: 397 - DNA, 318 bp, Homo sapien
cctcgcctggagggcccccgggcagcacagggaggacgagcttgtccagcagagggtctggcagagggtcccgcagaggtttgggcagggggtctgacatccctggctcctgctctggctctggctgccgggatttgcacaggcccaggtgcatacagatgccgtttgagtcagtctggttctggaagtagtcgatgaccagggggaagtagtcgtcaagcacttggttgcactggggcatgagcagcttcaaggggaggacgttgcactcctgctccaggaacttcctcatcgtgtcctggaaaatggcctccttgg

SEQ ID NO: 398 - DNA, 517 bp, Homo sapien
  misc_feature (1)...(517): n = A,T,C or G
ccttncttcgccatccattcatcgaccctctccagcacttgctgcaggcttggctgaccatccaccatggcttgaataatcccggtgagctctgtacagaatggggtaagctgtggatggactacaggctggacatacatgtgaaaggtagactcaatctccatggtccggccatttagctttaggatggggaactcgatgatttcctgaggatgaatctgtggcttgtcgcacgtggcctcaaagtccagcactaaaaagtagtgatacctctggagagggaaggacaccattgccgccatggatgcgccaaagccgtgggccgccagctttctggtggatatggagcagaactccggaacaccacagggagaaaataagtgggagcccagcacttttcttgctcttgaaagtaaatacgaagaaaatcgagctgctccagtctgtaaaggtgctagcattgaacatccagaagcatctaaaactctccttacttcgaagatgccaagaccggcag

SEQ ID NO: 399 - DNA, 329 bp, Homo sapien
ccaacctcaggcaacgggtggagcagtttgccagggccttccccatgcctggttttgatgagcattgaaggcacctgggaaatgaggcccacagactcaaagttactctccttccccctacctgggccagtgaaatagaaagcctttctattttttggtgcgggagggaagacctctcacttagggcaagagccaggtatagtctcccttcccagaatttgtaactgagaagatcttttctttttccttttttcggtaacaagacttagaaggagggcccaggcactttctgtttgaacccctgtcatgatcacagtgtcagagacgcg

SEQ ID NO: 400 - DNA, 451 bp, Homo sapien
ctggcttcactgctcaggtgattatcctgaaccatccaggccaaataagcgccggctatgcccctgtattggattgccacacggctcacattgcatgcaagtttgctgagctgaaggaaaagattgatcgccgttctggtaaaaagctggaagatggccctaaattcttgaagtctggtgatgctgccattgttgatatggttcctggcaagcccatgtgtgttgagagcttctcagactatccacctttgggtcgctttgctgttcgtgatatgagacagacagttgcggtgggtgtcatcaaagcagtggacaagaagctgctggagctggcaaggtcaccaagtctgcccagaaagctcagaagctaaatgaatattatccctaatacctgccaccccactcttaatcagtggtggaagaacggctcagaactgtttgtttcaattgg

SEQ ID NO: 401 - DNA, 180 bp, Homo sapien
ccaggaagcaggccaggggattggcagcactgcccagcaccacagccaggtggtaggccagacgcccgtagggtaagcaggaaaagctctgcacggcaggcagcacgccattggtcagcgcgttggtggcggccaacaggcccagcaggcaggcactgcgggctgatagaagctgatagg

SEQ ID NO: 402 - DNA, 385 bp, Homo sapien
ccaggccacctgtgcggggctcctcgatgtggaaggttcgggtgaggagattgtagaaggagccgtagcacacggccaccacagtgcacgtgaggcagatcacgttgtagggcatgctgaagtccggtgtcggcaggttcaccagcagcggctccgtgtagagccgcacaaagtagttagagccatcagagactgggaacaggctgttgaagaggggactctcttcccagtccactggcttggctgctaccatgctgggcacaagggcgctgaggacagatgggctgacatagaagccatggttaggatctggcgtgtactcggtccacttcagcagcgcccgctcaaactggatggaaaccttggtgactgagttggccggcag

SEQ ID NO: 403 - DNA, 440 bp, Homo sapien
  misc_feature (1)...(440): n = A,T,C or G
ctgtttaaccagnaacccggggggtcaccccccacagaatgtacatgaaacactagaggactgcatgtttttccctgagagaagcgtaagacaaacagaagtcaaaaagtagtcactgggagcgccatccttctaagcaaatcctccctttcccttttggaggatttgcccgaactacgtagccagtcagcacttagaccacctgcctcctcccccccctataaacccaccactcccctcctcctttcccaaaccacttggggtgtcctaagccctcactgccccaagcccaaaatatcagctaagatccttgtcagtatttccacagtcatacctaatgaattgggaagtggggcccctaaaaaccaattcacatctatgcacttgtttccactggatttggcagacaggcttttttagttaccgtaaccagatcttaa

SEQ ID NO: 404 - DNA, 239 bp, Homo sapien
cctacgaaaaactcccggccggtgaagagaacgtcagtgccatccagcgtcgcgttctcgtctcctatttccacaattcggagccccaggtcttgcagggctttgcggactccatcgacctctggcctacgagcggggctccagggccgcgtgattagggccgtgtccccttggatcacggccgtgtcgccaagcagcggtcccagcggcaatgactcctcaggtggcagttctagcag

SEQ ID NO: 405 - DNA, 261 bp, Homo sapien
ctggagaggcagcccttcaccggatgcccagctccgtgcccctgcgggccccagcacagtttaccttctccccccacggcggtcccatctactctgtgagctgttcccccttccacaggaatctcttcctgagcgctgggactgacgggcatgtccacctgtactccatgctgcaggcccctcccttgacttcgctgcagctctccctcaagtatctgtttgctgtgcgctggtccccagtgcggcccttggtttttgcag

SEQ ID NO: 406 - DNA, 641 bp, Homo sapien
  misc_feature (1)...(641): n = A,T,C or G
ctgctcccgggcntggtggcagcaagtagacatcgggcctgtgcagggccacccccttgggccgggagatggtctgcttcagtggcgagggcaggtctgtgtgggtcacggtgcacgtgaacctctccccggaattccagtcatcctcgcagatgctggcctcacccacggcgctgaaagtggcattggggtggctctcggagatgttggtgtgggttttcacagcttcgccattctggcgggtccaggagatggtcacgctgtcataggtggtcaggtctgtgaccaggcaggtcaacttggtggacttggtgaggaagatgctggcaaaggatggggggatggcgaagacccggatggctgtgtcttgatcggggacacacatggaggacgcattctgctggaaggtcaggcccctgtgatccacgcggcaggtgaacatgctctggctgagccagtcgctctctttgatggtcagtgtgctggtcaccttgtaggtcgtgggcccagactctttggcctcagcctgcacctggtccgtggtgacgccagaccccacctgcttcccctcgcgcagccaggacacctgaatctgccggggactgaaacccgtggcctggcagatgagcttggacttgcgg

SEQ ID NO: 407 - DNA, 173 bp, Homo sapien
ccaggtactggcacaatcatgtctggatgggggtggtggtgtcctgtaggcagagaaacaggaaattgtcgtagtcagtatcgagcagcgtggcctcgttcgccaccgtatagttgatcttgaacttctttggattctcagtcttctctccaaggaccttcttctcaacacag

SEQ ID NO: 408 - DNA, 165 bp, Homo sapien
ccactgtctgcagccatggcagaaagtgctcaaagtccagcaccttcacattcatctcatcactcttggggttccccaggaccttgagcacctcggcgttggtagggttctggcccagggccctcatcacatccccacactggctgtacaggatcttgccatcac

SEQ ID NO: 409 - DNA, 329 bp, Homo sapien
ctgtagcttctgtgggacttccactgctcaggcgtcaggctcagatagctgctggccgcgtacttgttgttgctttgtttggagggtgtggtggtctccactcccgccttgacggggctgctatctgccttccaggccactgtcacggctcccgggtagaagtcacctatgagacacaccagtgtggccttgttggcttgaagctcctcagaggagggcgggaacagagtgaccgagggggcagccttgggctgaccaaggacggtcagcttggtccctccgccaaataccgccggataagcaccactgttgtctgctgattgacagaa

SEQ ID NO: 410 - DNA, 235 bp, Homo sapien
  misc_feature (1)...(235): n = A,T,C or G
ccatcagngagaaaggtgtttgtcagttgtttcacaaaccagattgaggaggacaaactgctctgccaatttctggatttctttattttcagcaaacactttctttaaagcttgactgtgtgggcactcatccaagtgatgaataatcatcaagggtttgttgcttgtcttggatttatatagagctttttcatatgtctgagtccagatgagttggtcaccccaacctctggag

SEQ ID NO: 411 - DNA, 294 bp, Homo sapien
aattaagggaagatgaagatgataaaacagttttggatcttgctgtggttttgtttgaaacagcaacgcttcggtcagggtatcttttaccagacactaaagcatatggagatagaatagaaagaatgcttcgcctcagtttgaacattgaccctgatgcaaaggtggaagaagagcctgaagaagaacctgaagagacagcagaagacacaacagaagacacagagcaagacgaagatgaagaaatggatgtgggaacagatgaagaagaagaaacagcaaaggaatctacag

SEQ ID NO: 412 - DNA, 433 bp, Homo sapien
  misc_feature (1)...(433): n = A,T,C or G
cctgagaagccagaggcaggtggagagggggtggaaagtgagcagcgggctgggctggagccgcacacgctctcctcccatgttaaatagcacctttagaaaaattcacaagtccccatccacaaaaaaaaaaanaanaaaaatttcagggantaaaaatanactttgaacaaaaaggaacatttgntggcctgggggggcatctnantttntntagcnccagngattccctccccnccccacccatcacatanatgtaacacctttggtntaaaatggggagccgtttccaccntgcccccntccccgcccccaggcagttgccccggngacacntcaagacaggancgaggtagtntttcancancacagttncacaaggaacagaacagtntctcccgcccagccctgcggcacaagggattgacacgcn

SEQ ID NO: 413 - DNA, 494 bp, Homo sapien
  misc_feature (1)...(494): n = A,T,C or G
ccttatttctcttgtcncttcgtacagggaggaatttgaagtagatagaaaccgacctggattactccggtctgaactcagatcacgtaggactttaatcgttgaacaaacgaacctttaatagcggctgcaccatcgggatgtcctgatccaacatcgaggtcgtaaaccctattgttgatatggactctagaataggattgcgctgttatccctagggtaacttgttccgttggtcaagttattggatcaattgagtatagtagttcgctttgactggtgaagtcttagcatgtactgctcggaggttgggttctgctccgaggtcgccccaaccgaaatttttaatgcaggtttggtagtttaggacctgtgggtttgttaggtactgtttgcattaataaattaaagctccatagggtcttctcgtcttgctgtgttatgcccgcctcttcacgggcaggtcaatttcactggttaaaagtaagagacag

SEQ ID NO: 414 - DNA, 294 bp, Homo sapien
ctgggcggatagcaccgggcatattttggaatggatgaggtctggcaccctgagcagtccagcgaggacttggtcttagttgagcaatttggctaggaggatagtatgcagcacggttctgagtctgtgggatagctgccatgaagtaacctgaaggaggtgctggctggtaggggttgattacagggttgggaacagctcgtacacctgccattctctgcatatactggttagtgaggtgagcctggcgctcttctttgcgctgagctaaagctacatacaatggccttgtgg

SEQ ID NO: 415 - DNA, 421 bp, Homo sapien
ccttgcccctgccctcccacgaatggttaatatatatgtagatatatattttagcagtgacattcccagagagccccagagctctcaagctcctttctgtcagggtggggggttcagcctgtcctgtcacctctgaggtgcctgctggcatcctctcccccatgcttactaatacattcccttccccatagccatcaaaactggaccaactggcctcttcctttcccctgggaccaaaatttaggggcctcagtccctcaccgccatgccctggcctattctgtctctccttcttccccctggcctgttctgtctctgagctctgtgtcctccgttcattccatggctgggagtcactgatgctgcctctgccttctgatgctggactggccttgcttctacaagtatgcttctcccacag

SEQ ID NO: 416 - DNA, 342 bp, Homo sapien
  misc_feature (1)...(342): n = A,T,C or G
ccactttctttcccacnctggaaggcggcatctatgacttcattggggagttcatgaaggccagcgtggatgtggcagacctgataggtctaaaccttgtcatgtcccggaatgccggcaagggagagtacaagatcatggttgctgccctgggctgggccactgctgagcttattatgtcccgctgcactcccctatgggtcggagcccggggcattgagtttgactggaagtacatccagatgagcatagactccaacatcagtctggtccattacatcgtcgcgtctgctcaggtctggatgataacacgctatgatctgtaccacaccttccggccgg

SEQ ID NO: 417 - DNA, 389 bp, Homo sapien
tattaattaggttcttaagacatttagaacaccaatttgtgaggataaattccattcgtcagagcaaacacagatcgcaggtagccctggagctgaggaatagctttgatttttggtaaaatttgtgagtccacagctttctgatcaatcttgcgctgctccgtaatctcatatttctctttttctgtgtcgaagatctcaccttcctggtgtctgggcttccgcagcttcttcttcttgaagtaagcatcagtaagatgttttgggatttttacattgctgatatcgattttggttgaagtggcaatgacaaatttctggtgtgttcttcgtagaggaactcgattgaggaccagaggtccagtcacaagtaataagccactagccag

SEQ ID NO: 418 - DNA, 343 bp, Homo sapien
gtgggagggagccaggttgggatggagggagtttacaggaagcagacagggccaacgtcgaagccgaattcctggtctggggcaccaacgtccaagggggccacatcgatgatgggcaggcgggaggtcttggtggttttgtattcaatcactgtcttgccccaggctccggtgtgactcgtgcagccatcgacagtgacgctgtaggtgaagcggctgttgccctcggcgcggatctcgatctcgttggagccctggaggagcagggccttcttgaggttgccagtctgctggtccatgtaggccacgctgtttttgcagtggtaggtgatgttctgggagg

SEQ ID NO: 419 - DNA, 255 bp, Homo sapien
cctagcaagagaatcaccaaatttatggagagttaacaggggtttaacaggaaggaagtgcctttagtaagttctcaagccagaggctggaggcagcagctaaatcagaggacagcatcctcagtgaaagtgagccattcggggtggcatgtcactccaggaataaacacaacttagaaacaaatgatttcgtaggatagcacagtgacatggtgcactgtgaacctgaggccactgtgtcaaactgtgcactgg

SEQ ID NO: 420 - DNA, 261 bp, Homo sapien
cttctgatgataaccaacccctagctaccactctgtattcatcaggggaggggtataaaccccacatgcaagaagaacccttgcccccagtgtcaaatgggatggggatgctagagttatagtaaaggggaaaccctatgtaagctgttaacagagttcacaggggtagggataacccctgttctccagctcccaaatgtgctcactttcccagcttcttcatccgttcatcaatgctggcaaagttcccctcaactgtgg

SEQ ID NO: 421 - DNA, 179 bp, Homo sapien
ccttcctgttgttgtttcaaatgctgcttgatttctcgtaacagatctgcatctatgtaatacctttcttcagatctgactgctccaaaatgattctgcatcctgatttgagacatcaattcatttagtcggcccttgaactgagtaggtgcatttagttcaccctgaatcgtatccag

SEQ ID NO: 422 - DNA, 424 bp, Homo sapien
cgaggtccaaatctgatctgcagatgcagaagattcgacagaagctgcagactaaacaggctgccatggagaggtctggaaaagctaagcaactgcgagcacttaggaaatacgggaagaaggtgcaaacggaggttcttcagaagaggcagcaggagaaagcccatatgatgaatgctattaagaaatatcagaaaggcttctctgataaactggatttccttgagggagatcagaaacctctggcacagcacaagaaggcaggagccaaaggccagcagatgaggaaggggcccagtgctaaacgacggtataaaaaccagaagtttggttttggtggaaagaagaaaggctcaaagtggaacactcgggagagctatgatgatgtatctagcttccgggccaagacagctcatggcagagg

SEQ ID NO: 423 - DNA, 256 bp, Homo sapien
ctgtggcctagggctacctcaagactcacctcatccttaccgcacatttaaggcgccattgcttttgggagactggaaaagggaaggtgactgaaggctgtcaggattcttcaaggagaatgaatactgggaatcaagacaagactataccttatccataggcgcaggtgcacagggggaggccataaagatcaaacatgcatggatgggtcctcacgcagacacacccacagaaggacactagcctgtgcacgcg

SEQ ID NO: 424 - DNA, 330 bp, Homo sapien
ccagccgcatgggagtggaggcagtcatcgccttgctagaggccaccccggacaccccagcttgcgtcgtgtcactgaacgggaaccacgccgtgcgcctgccgctgatggagtgcgtgcagatgactcaggatgtgcagaaggcgatggacgagaggagatttcaagatgcggttcgactccgagggaggagctttgcgggcaacctgaacacctacaagcgacttgccatcaagctgccggatgatcagatcccaaagaccaattgcaacgtagctgtcatcaacgtgggggcacccgcggctgggatgaacgcggccgtacgctcag

SEQ ID NO: 425 - DNA, 333 bp, Homo sapien
  misc_feature (1)...(333): n = A,T,C or G
ctgctccatggnctcaaagtcagcaccacccacacccacaatgatcactgacatgggcaggttcgaggcacgcaccacagcctcacgtgtggcttccacatccgtcacagcaccatcagtcagnagaaacagnatgaagtattgngaggcantcccctgatgtgcagcctgggctgcaaacctggacctgcccgggcggccgctcgaaagggcgaattccagcacactggcggccgttactagnggatncaganctcggtacnaagcttggcagtaatcatggtcatagctgtttcctgtgagcggntgggatgaacgcggccgtacgctcat

SEQ ID NO: 426 - DNA, 411 bp, Homo sapien
  misc_feature (1)...(411): n = A,T,C or G
gggtgttcatcatgaggattgcttctgccatggagctgatggacgtgggcaggttgctgagaaggtggggtggaagtgagtgccgggggtgggtgagtgccctggtcttgttcataggggagcctttccctagcagtggaacgctgtggtcattttctctagcatattcccttgggaagtctagatttgctattaatctggctgagaatctaagttctgtgccttagagacagtttgcactttcccatattgtgcctgggacagccatatgattttttttcccaccaaacaagtatgcaaacagaaaccagttcaaagggggatggtgtaaaagatgaggcagtanaaatgcctttgaatggttttctgtagctaattctctttaaattttgtcctgctttttttctttat

SEQ ID NO: 427 - DNA, 450 bp, Homo sapien
  misc_feature (1)...(450): n = A,T,C or G
acgtgtacaagtttgaactggatacctctgaaagaaagattgaatttgactctgcctctggcacctacactctctacttaatcattggagatgccactttgaagaacccaatcctctggaatgtggctgatgtggncatcaagttccctgaggaagaagctccctcgactgtcttgtcccagaaccttttcactccaaaacaggaaattcagcacctgttccgcgagcctgagaagaggccccccaccgtggtgtccaatacattcactgccctgatcctctcgccgttgcttctgctcttcgctctgtggatccggattggtgccaatgtctccaacttcacttttgctcctagcacgattatatttcacctgggacatgctgctatgctgggactcatgtatgtctactggactcagctcaacatgttccagaccttgaagtacctgg

SEQ ID NO: 428 - DNA, 377 bp, Homo sapien
  misc_feature (1)...(377): n = A,T,C or G
cagggctatagtgcgctatgttgatctggtgttcatgctaagttccgcatcaatatggtgacttcttgggagtgggggaccaccaggttgcctaaggaggggtgaacctgcctacgttggaaatagagctggncaaaactcctgtgctcatcagtagtagaattgcacctgtgaatagccnccgccctccagcatgggcaacataacaagaccctgcctcttaaagataaaaattggaaaacactngtaggaaaaaaagggtgnttggtctaaataaatntggattgggnataaatgacncaaaactatcatgaatttgaaagcntttctaatttcttgaaagtctgaaaaaagttaaancncaattttatctnaaa

SEQ ID NO: 429 - DNA, 206 bp, Homo sapien
gttgctcctccaaagaaggttggcttcaaggccgtgtccagggacccacgagcagaggcactggggggcaagggatctccaagggggcaagggatccctaaagggggtagctcacaggtgagggggtttagggcccctctagggagcgcctgaggccatacattcaagagtgtccctggtgaggcccagggaagagccaggactgg

SEQ ID NO: 430 - DNA, 473 bp, Homo sapien
  misc_feature (1)...(473): n = A,T,C or G
ccttatttntcttgtcctttcgtacagggaggaatttgaagtagatagaaaccgacctggattactccggtctgaactcagatcacgtaggactttaatcgttgaacaaacgaacctttaatagcggctgcaccatcgggatgtcctgatccaacatcgaggtcgtaaaccctattgttgatatggactctagaataggattgcgctgttatccctagggtaacttgttccgttggtcaagttattggatcaattgagtatagtagttcgctttgactggtgaagtcttagcatgtactgctcggaggttgggttctgctccgaggtcnccccanccgaaatttttaatgcaggtttggtagntnaggacctgtgggtttgttaggtactgggtgcattaataaattaaagctccatagggtcttctcgtcttgctgtgttatgcccncctcttcacgggcaggtcaatttca

SEQ ID NO: 431 - DNA, 215 bp, Homo sapien
  misc_feature (1)...(215): n = A,T,C or G
cctgtatnaagctanaaaaagactaccagcccgggatcaccttcatcgtggtgcagaagaggcaccacacccggctcttctgcactgacaagaacgagcgggttgggaaaagtggaaacattccagcaggcacgactgtggacacgaaaatcacccaccccaccgagttcgacttctacctgtgtagtcacgctggcatccaggggacaagcagg

SEQ ID NO: 432 - DNA, 391 bp, Homo sapien
  misc_feature (1)...(391): n = A,T,C or G
ccagcactgccacaaactttttcagggccaccaggcgctgcccttccaggaccgggaacctgcccacttctatccgcaggatgtagtgcagtgcagattccaggtcagccatgtagatcctggagcgatctgccaatttccaaacagtgggagctatcttgttagcagtggttggtgcaactgtggtctgggcagcctccctggtgagcccagagagtctctgcaggtaagcggtatagaaggacctggattccatgagcacggggactcgggagacggagccattccggaacagcaggtagcaagaggggaagtcggtgacaccaaactttctcaccacattggcctctgtgttcagcaccctgcgcaccgccacncctttgtgctggga

SEQ ID NO: 433 - DNA, 420 bp, Homo sapien
  misc_feature (1)...(420): n = A,T,C or G
ctgtagcttctgtgggacttccactgctcaggcgtcaggctcagatagctgctggctgcgtacttgttgttgctttgtttggagggtgtggtggtctccactcccgccttgacggggctgctatctgccttccaggccactgtcacggctcccgggtagaagtcacttatgagacacaccagtgtggccttgttggcttgaagctcctcagaggagggcgggaacagagtgaccgagggggcagccttgggctgacgtaggacggttagtttggnccctccgccgaatgccgcanttctactgtcccacacctgacagtaatagtcancctcatcttcggcttgggctctgctgatggtcagggtggcccgtgntccccgagttggagccagggaatcnctcagggatcccanagggccn

SEQ ID NO: 434 - DNA, 239 bp, Homo sapien
  misc_feature (1)...(239): n = A,T,C or G
ccaaccangagagaagggatcgcctggtgcccagggcccaccaggagctccaggcccacttgggattgctgggatcactggagcacggggtcttgcaggaccaccaggcatgccaggtcctaggggaagccctggccctcagggtgtcaagggtgaaagtgggaaaccaggagctaacggtctcagtggagaacgtggnccccctggaccccagggtcttcctggtctggctggtncag

SEQ ID NO: 435 - DNA, 415 bp, Homo sapien
  misc_feature (1)...(415): n = A,T,C or G
ctgtccaatggcaacaggaccctcactctattcaatgtcacaagaaatgacgcaagagcctatgtatgtggaatccanaactcagtgagtgcaaaccgcagtgacccagtcaccctggatgtcctctatgggccggacacccccatcatttcccccccagactcgtcttacctttcgggagcaaacctcaacctctcctgccactcggcctctaacccatccccncantattcttggcgtatcaatgggataccgcagcaacacacacaagttctntttatcgccaaaatcacgccaaataataacgggacctatgcctgtttagggntntaacttggntactggccgcaanaattccatagtcaagagcatcacagnctctgcatntggaacttctcctggctntcagacctgn

SEQ ID NO: 436 - DNA, 152 bp, Homo sapien
ccaggattgacaggccatccattcacagccaggagatgctgggccagtccctccaagaggtctccgtcatggcagtgatgaaaacctaacagggtggccccctgtgccagctcaggtgactggagcccgagggcctgacaggttcccagcag

SEQ ID NO: 437 - DNA, 174 bp, Homo sapien
ccaggtactggcacatcatgctctggatgggggtggtggtgtcctgtaagcagagaaacaggaaattgtcgtagtcagtatcgagcagctgtggcctcgttcgccaccgtatagttgatcttgaacttctttggattctcagtcttctctccaaggaccttcttctcaacacag

SEQ ID NO: 438 - DNA, 485 bp, Homo sapien
  misc_feature (1)...(485): n = A,T,C or G
ccacggccctctcggccctctcgctgggagcggagcagcgaacagaatccatcattcaccgggctctctactatgacttgatcagcagcccagacatccatggtacctataaggagctccttgacacggtcaccgccccccagaagaacctcaagagtgcctcccggatcgtctttgagaagaagctgcgcataaaatccagctttgtggcacctctggaaaagtcatatgggaccaggcccagagtcctgacgggcaaccctcgcttggacctgcaagagatcaacaactgggtgcaggcgcagatgaaagggaagctcgccnggtccacaaaggaaattcccgatgagatcagcattctccttctcggngtggcgcacttcaaggggcagngggtaacaaagtttgactncagaaangacttccctcgaggatttctacttggatgaagagaggaccgtgagggtccccatgatgtcggaccc

SEQ ID NO: 439 - DNA, 317 bp, Homo sapien
  misc_feature (1)...(317): n = A,T,C or G
gggccgtcttcccctccatcgtggggcgccccaggcaccagggcagtgatggtgggcatgggtcagaaggattcctatgtgggcgacgaggcccagagcaagagaggcatcctcaccctgaagtaccccatcgagcacggcatcgncaccaactgggacgacatggagaaaatctggcaccacaccttctacaatgagctgcgtgtggctcccgaggagcaccccgtgctgctgaccgaggcccccctgaaccccaaggccaaccgcnagaagatgacccagatcatgtttgagaccttcagcaccccagccatgta

SEQ ID NO: 440 - DNA, 338 bp, Homo sapien
  misc_feature (1)...(338): n = A,T,C or G
ccanaaagacttcccagggaagatgcttggctctctgctccaaggtgggccatggtatagggccctcgaagggcttgtggctggggtgatcccagggggcattgctcaaagtgcacaggaggtggcagcagggtcaggcgagttcctgttccagggacatcaggagggagggtagaagcctagggagtgtgcgaggctgctgggatgagggagctcaggggctaccagctaaccagcctcagctcaatggtttctccatccttgggtctgtagtcagcaataccttgcaacagtggggtgttggggtctcggagaagctgccagaactccctttctcc

SEQ ID NO: 441 - DNA, 505 bp, Homo sapien
  misc_feature (1)...(505): n = A,T,C or G
ccacacagantcaccaagccacagacttgtcttccacaagcacgttcttatcttagccacgaagtgaccaagccacacgtactaaaggttgaactcaaagatatgtacagggtattaaacaaataccaaggggaacagttaacttcaatacaaggtcgaaatcagcaacaagttctacaatccagngctgatatcagatacaagcttcaaggacaatttcttttcgaaggcttattccagtttcgngaggctagcatgaggtgtgtgcatttgccaggggcaaatttctattctcaattaacccatgcagcaaatgctacncatggtgcngagtccgtttagaagcatttgcggtggacgatggaggggcccgactcgtcttactcctgcttgctaatccacnngngctggaaggnggacagtgaggccacggatggagccaccnatccacaccgagtncttgcgctctgggggtgcgatnatnttgatcttcatggtgctgggc

SEQ ID NO: 442 - DNA, 386 bp, Homo sapien
  misc_feature (1)...(386): n = A,T,C or G
cgccaggtgatacctccgccggtgacccaggggctctgcgacacaaggagtctgcatgtctaagtgctagacatgctcagctttgtggatacgcggactttgttgctgcttgcagtaaccttatgcctagcaacatgccaatctttacaagaggaaaccgtaagaaagggcccagccggagatagaggaccacgtggagaaaggggtccaccaggccccccaggcagagatggtgaagatggtcccacaggccctcctggtccacctggtcctcctggcccccctggtctcgatgggaactttgctgctcagtatgatggaaaaggagggnggacttggccctggaccaatgggcttaatgggacctanaggcccacctggtgcag

SEQ ID NO: 443 - DNA, 404 bp, Homo sapien
  misc_feature (1)...(404): n = A,T,C or G
cctccctctcagagcttgccccagggactctctggccctcagggttcaatgtattctgaccaaggccaagctttcctggggctcagggaaaatcacactttgctacccgaagctgtatcccctcagatgccaggaaggccgtgatcatctgactccaccctcctgagacacattctctccctgactgtcctgttctaagtcagcggagcaccttaggatggaggggtggaggcgaggccangatgcagcctctgtgaacaggtgcctggaggctgggaaatgaccctgagagggcaggacacagcnaccgngggcttaaggtgagggnggagagcaagnttggcccactttacaattctagntcagagccancccctaacatggngggcatttattcatttcgg

SEQ ID NO: 444 - DNA, 318 bp, Homo sapien
  misc_feature (1)...(318): n = A,T,C or G
catgggctatagtgcgctatgttgatctggtgttcatgctaagttccgcatcaatatngcgacttcttnggagtgggggaccaccangttgcctaaggaggggtgaacctgcctacgttggaaatagagctggtcaaaactcctgtgctcatcagtagtagaattgcacctgtgaatagccaccgccctccagcntgggcaacatagcaagaccctgcctcttaagataaaaattggaaaacactggtangaaaaaaaggctgtttggtctaaanaagtctggatngggtataaatgacacnaanctatcatgactnt

SEQ ID NO: 445 - DNA, 418 bp, Homo sapien
  misc_feature (1)...(418): n = A,T,C or G
ccagtccaacctgctcctcattattgtataaatgagcagaatcaatatggcggaagccagcttcaattgccaatttggtggcctctaaagctttacttttaggaacctctgcaggcgcataggtgccaaatcccaggacaggcatgaagtgaccatcattcagcttcacacactgatatttcgaatccatttctgtcactagcctggctggcaaatgtttctttcttcctccctcacaggctataagagcaatgagctggcaacgcccctgagcacactgtctgctgnttaaccaatggcatgtgagaggagggacagaggcagtcttacacaagctgtgataaaaattgcatncagttcaaccagtttcttacnttattctaatgngnaggaagtgtgngaagagcacaaagtcaga

SEQ ID NO: 446 - DNA, 361 bp, Homo sapien
  misc_feature (1)...(361): n = A,T,C or G
ctgtccaatnacaacaggaccctcactctactcagtgtcacaaggaatgatgtaggaccctatgagtgtggaatccanaacgaattaantgttgaccacagcgacccagtcatcctgaatgtcctctatggcccagacgaccccaccntttccccctcatacacctattaccgtccaggggtgaacctcagcntctcctgncatgcagcctctaacccacctgcacagtatccttggctgattgatgggaacntccagnaacacnacacaagagctctttatctccancntnactganaagaacagcgcgactctatnccttccagggggggggggtggggnntgnggaccttnccgggcc

SEQ ID NO: 447 - DNA, 321 bp, Homo sapien
  misc_feature (1)...(321): n = A,T,C or G
ccagganantggttccccaaaggggacctcacccgccccgagctctggagccgctgacgctcgcatccaggacatttgagatgggaatccaaataggctacttgnaaaagacgtgctgcangcagccctggagagactcatggagttcattgtacattactccatctaccgaggcagcgcatggcatgactnaacggcttgnaacaaacacanaaattaccaccacaaacattcaggaaccaaatataatctgctatggtcacaccacagacaatgcaggaagaggctttttattgctngngtgngttttcaaatcatgtt

SEQ ID NO: 448 - DNA, 325 bp, Homo sapien
  misc_feature (1)...(325): n = A,T,C or G
ccagcttcaactttttagtatagaagatacaggatcacaaaaaggagactacgctttgcaaacatagcatcaaaattcaacttttctctttgcagtttatccatggngtcagcataccttgcaagggaagctacttacatcaaataacttttctatatacatttcctcattgaccttttctcaaagaatatcttggttttgccgaacaaacataatataggngtctgccagatccattcctggtttctgtngtgaaggaaaagcagggggaacaaaataatatcagggtctcaatngtganattattatttaatcataccctgan

SEQ ID NO: 449 - DNA, 123 bp, Homo sapien
  misc_feature (1)...(123): n = A,T,C or G
cattaatnttggaagcgatggtgtggattacatcagtgttagggcatggtgtggatattattacattannattggaagcgatggtgtggattacatcagtgatagggcacggtgtggatatta

SEQ ID NO: 450 - DNA, 328 bp, Homo sapien
  misc_feature (1)...(328): n = A,T,C or G
ctggcaattttgagctgccggttatacaccaaaatgttctgttcagtacctagctctgctcttttatattgctttaaatttttaaagaaattatattgcatggatgtggttatttgtgcatattttttaacaatgcccaatctgtatgaataatgtaaacttcgatttttttttaaaaaaattagattttagctggagcttttgactaatgtaaagtaaatgccaaactaccgacttgatngggatgtttttgtaangttaattttctaagactttttcacatccaaagtgatgctttgctttgggttttaactgtttcaacntnggn

SEQ ID NO: 451 - DNA, 209 bp, Homo sapien
ctgccttgtttcaacagacatgcaaagatcctaggagacagtccccatagaccttcagacattaaaaagggagccgtacagtttgtttgaagcacttcgtcttacccatttatgcaggggccccaggaaacttacacacagccagaatgaggttcccaaaggacttacattaattatggctcttgcttcctttcacaaatgagctgagg

SEQ ID NO: 452 - DNA, 457 bp, Homo sapien
  misc_feature (1)...(457): n = A,T,C or G
ctgtctantcccttcaagagctgtttatagaagcttgagaatggggtaaaaatttctgctagcaaaatcaagttctttttgaaattttatcagtaatccagaatttagtagtccatgccttctcactcagcatttagaaataaaaatgtggtttcttaaacgtatatcctttcatgtatatttccacatttttgtgcttggatataagatgtatttcttgtagtgaagttgttttgtaatctactttgtatacattctaattatattatttttctatgtattttaaatgnatatggctgtttaatctttgaagcattttgggcttaagattgccagcaccacacatcagatgcagtcattgttgctatcagtgtggaatctgatagagtctngactccggccacttggagttgtgnactccaaagctaaggacagtgatgaggaagatggcatgtgg

SEQ ID NO: 453 - DNA, 277 bp, Homo sapien
ccaattgatttgatggtaagggagggatcgttgacctcgtctgttatgtaaaggatgcgtagggatgggagggcgatgaggactaggatgatggcgggcaggatagttcagacggtttctatttcctgagcgtctgagatgttagtattagttagttttgttgtgagtgttaggaaaagggcatacaggactaggaagcagataaggaaaatgactacgagggcgtgatcatgaaaggtgataagctcttctatgataggggaagtagcgtcttgta

SEQ ID NO: 454 - DNA, 198 bp, Homo sapien
gttaaaagatagtagggggatgatgctaataatcaggctgtgggtggttgtgttgattcaaattatgtgttttttggagagtcatgtcagtggtagtaatataattgttgggacgattagttttagcattggagtaggtttaggttatgtacgtagtctaggccatatgtgttggagattgagactagtagggctagg

SEQ ID NO: 455 - DNA, 608 bp, Homo sapien
  misc_feature (1)...(608): n = A,T,C or G
ctgagcaagctaaggaccaggggcaactagaccctaataatgngtacttttgaaaatgatacaaactaccttggttgtaagaagtgcaggttgaacactttaggagaacagtcttcaaactggcaattcaaaatttcccattatatgtgaataaaattggaaggatgttaaatgtccatggaaagttactcttgtaagttaggatgccttatactgaggctttanaatgaaagtacacttcacaaatggaatagtgaacataaattaccagaagtcaagataatagtcatactagtaaggtaagcaaggtaaattcccttatacacaaaaattattttgatgacctttttcaataatgaatctgaaatgaagtgttttaaaaagctccctaaacacaaaacgaacataaaactgcttaataactttagagctcatgtaatattcttgctgaaaacagttactgaaattaccagcgaaatgatggaatatctttaaagcaggncactcngtataatctggaataatttcatttgctaacttttaagaagtattctctggactataaatcntgggcaaatagacttccactttattattaccccaaatta

SEQ ID NO: 456 - DNA, 467 bp, Homo sapien
  misc_feature (1)...(467): n = A,T,C or G
cctggacctgtgtaaaccttcaaacactcttttttacattaggtcgtgaagttaaattttttactgtttctgtgctacagactcttcaaagggaaatagttaagtcaatttcaaagaaaatgaccagcacatttttaaaacattagaaatgatttgactttgactatctactgccaaaaaaaggttaaggaatttgtaatgagaagctaaaaactttaaggaattttaaggaactcaaaacaaaaactcattaaatgtaattaaagtgaattctacaaataaagcctcttaatacatttctataatagtcacttaagacttaaattcaaacactagcaaaccacaaaatcagactgtntgactgacatccaaaagataaatataaatcaaaatccgaccccagcattagccaaggggtaggtgttcctcttgaggaaggcaggaattcctcttctgccacctgttgg

SEQ ID NO: 457 - DNA, 183 bp, Homo sapien
  misc_feature (1)...(183): n = A,T,C or G
ccaaattttntactttaaacactgaaaacagaggaagttaataaaaattttaacctataaagtcccctggttgttagtcattaacagcagattgtcagataagactggtaaaatgatggctgctaagcatttgatgatccaggcgcaggatgatcaaactgcagcagatcatgcacgtgacag

SEQ ID NO: 458 - DNA, 445 bp, Homo sapien
  misc_feature (1)...(445): n = A,T,C or G
gaaaaatataaagccaaaaattggataaaatagcactgaaaaaatgaggaaattattggtaaccaatttattttaaaagcccatcaatttaatttctggtggtgcagaagttagaaggtaaagcttgagaagatgagggtgtttacgtagaccagaaccaatttagaagaatacttgaagctagaaggggaagttggttaaaaatcacatcaaaaagctactaaaaggactggtgtaatttaaaaaaaactaaggcagaaggtttttggaagagttagaagaatttggaaggccttaaatatagtagcttagtttgaaaaatgngaaggactttcgtaacggaagtaattcaagatcaagagtaattaccancttaatgtttttggcnttggactntgagttaagattattttttaaatcctgaggactancattaatgggacag

SEQ ID NO: 459 - DNA, 426 bp, Homo sapien
  misc_feature (1)...(426): n = A,T,C or G
cctatgatancttctctagctatcatactccaatcagcaaaaaatgagaaaatgttgagaaatagaagataattcctcatttaaggccaccttctagaatttgtgcttaagattctgctttcttctcatgggccagcacttcggcaactggcaaaaattaggtgtacagggatctaggtaatactgtttatttgagcaataatatattgtgctaacgttcaggcatcctattactgagaaataagggaaaatgagtgtaaagtacaactaagagtctcggcgacagggaaaaataccatcagttaaatatccatagtcctagagcatttatgtaaaactgcaatntgaatcctgcaatacatnttggctttttccctcagtgataccatgtgagggaagnngctctgtcaaggcgggccggataga

SEQ ID NO: 460 - DNA, 348 bp, Homo sapien
  misc_feature (1)...(348): n = A,T,C or G
ccaaattttaaaatgttatttttcatatcatttataaccttgtcacaatccacttaaagaagtttggttatatttcactgaaaattttcttccagagtaggttttttttcgtgggttggggggtaactttactacaattagtaagtntggtgcagaatttcatgcaaatgaggagtgcagcagngtgataatttaaacatatntaaacaaaaacaaaaaaaatgaatgcacaaacttgctgctgcttagatcactgcagcttctaggacccggtttcttttactgatntaaaancaaaacaaaaaaantaannacnttgtgcctgaaatgaancttgtttttttntna

SEQ ID NO: 461 - DNA, 378 bp, Homo sapien
  misc_feature (1)...(378): n = A,T,C or G
ccactaagacagaacggaatctagtagaagtgcaccaatgcttcagtccctcctactcagcatggtgagcagtggtcaatctgtgccctgtggaatgatgggcagataattctggcatgtgtaaataataataaataattcacttggtgcaggcagtatgtctatgaattaaaacctagtgtgtacacagtgcctacatgtgttacagccccacagtaggaatctacaccaaaatatttattagaaggaatttggtccgtactacatcacgctttccggagggtaaaaaataaagtccatctatagacatttcaccacagacccagagactgagtctggctaaaacctgcaaaatgtctataacaaaagnggatggct

SEQ ID NO: 462 - DNA, 197 bp, Homo sapien
  misc_feature (1)...(197): n = A,T,C or G
gcgaggtccacactattaaaagctgttgggtaattgaaggtgatataaaatgactgtcntcatttggagtgngcagcacanttacttcatgttgctcangtttanaacaatntcccctgnaagttctcacacagatnggnagaaatcatacctanttntggtnaatcactatggcagccgtngaagaatntaagaga

SEQ ID NO: 463 - DNA, 279 bp, Homo sapien
  misc_feature (1)...(279): n = A,T,C or G
cataagtgatgangaggnaaaatcantnaataagcctacaacntagaatacattaaaacttgcacatatacatgttcacagcatgtatacaatgataatccctacggtttaaccaagttatggttcccttctacagcagacacaaaaccaaggtgaactaggtnggcagatgtanagggaataccaaaaaaagggtaatnngntcactgattctgaagnatntgactgancatactgagcttctgnactttgggaatgcatnnaggnaacaatatcttg

SEQ ID NO: 464 - DNA, 552 bp, Homo sapien
  misc_feature (1)...(552): n = A,T,C or G
gatgggttgataggtgcagcaaaccaccctggcgcatgtttaccaatgtaacaaacctgcacatcctgcacaggtactccaaaactaaaagtaaaaaaatctaaaagaaaaaagaaaaagaattaaacccaaaatcacttccccatctggacttgatttagatgaaaagcttctggactttgagctgatgctatagtgggttgaaaattttggggtcctcagaaggggatgaggatatattgcatgagagagcaacatgaatcatngagagccagagtatagagagnggtgggtagactgtaggagagccctcaatgatcccggctgtcttgtattcgcgttgcacttacttgtataatatggcagatgggatgtgatgtcactttcaagattangttataaatagactatggcttcaatcagagggttttcttctctgtctanctctcttttgggtagnttcattctgagagaaagccanacctcngccgcnacccacgctaaggggcganttccagcncactggcggccngttactagtggatccgngct

SEQ ID NO: 465 - DNA, 444 bp, Homo sapien
  misc_feature (1)...(444): n = A,T,C or G
ccactcttggtagaaaccttgaaactttcaccttgctgggctttagcaaagtttccttttacagttctgtttatgagcttcagctactgataaagcacttcctgaacttctctattatcatagngaccctctgaataacctgagtgactggctcggcaattcgctttataaccattcttattcccaaagttggagcacataaacatttagatgtcttttcctgtaaaatattctagacatttacccaaactctagttcaacatatactcaacttgcactgtatatctccctgcttttttgagacagagaagaaattcaggaggtgncccatctccagagtttctctgttggaaagcagcnatcaagaancctttaaaaaattggtgtnaagctntgccncctgcagaaatgcntngccccacattattcttctggggnaaagna

SEQ ID NO: 466 - DNA, 381 bp, Homo sapien
  misc_feature (1)...(381): n = A,T,C or G
cctactatgggtgttaattttttactctctctacaaggttttttcctagtgtccaaagagctgttcctctttggactaacagttaaatttacaaggggatttagagggttctgtgggcaaatttaaagttgaactaagattctatcttggacaaccagctatcaccaggctcggtaggtttgtcgcctctacctataaatcttcccactattttgctacatagacgggtgtgctcttttagctgttcttaggtagctcgtctggnttcgggggtcttagctttggctctccttgcaaagttatttctagttaattcattatgcannaggtataggggntagtccttgctatattatgcttggttataatttttcatctttc

SEQ ID NO: 467 - DNA, 95 bp, Homo sapien
  misc_feature (1)...(95): n = A,T,C or G
cctatanattntggnttgtatactgggtcctgaaaaccctcttggngctctgtttttaaggagctgaanccaangancgccaataataatacttt

SEQ ID NO: 468 - DNA, 224 bp, Homo sapien
cagtgggtctctgatgccttgcctgcagcagaaggagggagcagagatcaagaggaaggaaaaaatcatatgtacttatttgaaggtaaagattattctaaagagcccagtaaggaagacagaaaatcatttgaacaactggtaaaccttcagaaaacccttttggagaaagctagtcaagagggccgatcactccgaaataaaggcagtgttctcatcccagg

SEQ ID NO: 469 - DNA, 416 bp, Homo sapien
ctgagttctagttcaaaagctttatccttaacttcgtcatgtactatgtaaattctagaatagaaaagggaaaggtaagattttggtaacctccaaacattgaagtagttcacagacccaaagtcagtacaaattagaatgtccatccataataaaagtatctataaaattacacagacacattctacatagtatttaacattagagaagacaaattacacagggactgaaataaaatgaaacatctactctcccgacaaatgttgaatatacctaatcaacccaagttcagtttatttttgcacattgctttagagatataacttggctgggcacagtggctcacacctgtaatcccaacactttgggagaccaaggcggatggatcacttgaggtcagttcgagactagcctgg

SEQ ID NO: 470 - DNA, 376 bp, Homo sapien
caccttttaactgtatcacaaagtctgttgctgtggttacagcctttgtttccagtgatgttttgtccatgctttcccccaacccttaacaatggttactcaaaagaatgaaataatgagtcattcattcgggaatatgttaaaatatccctctttatcattacatttcactgcttagaaactaggctgtaattcaaggcaacagttaagtctgagaactgttaaaaaaatctttgattttttttcatttttaagaaaaacctgcctatttaattgttcagacttgtaagaggttcttcaattacatcctttttggttaatgtattatttctggaacaagtagataaaattctacgcagtaagcataataaaaatc

SEQ ID NO: 471 - DNA, 357 bp, Homo sapien
ggcttcgtataatggttcttttgtcacccctgatcgacgatttcgctacccgtacaactctgacaagggaacgaaatgcttctgtgtattcacctagtggtcctgtgaacagaagaacaacaactccaccggatagtggagtactgtttgaagggttaggcatttcaacaagacctagagatgttgaaattcctcagtttatgagacagattgcagtaaggaggccaactacggcagatgaaagatctttgcggaaaattcaagaacaagatattattaattttagacgaactctttaccgtgctggtgctcgagttagaaatattgaagatggtggccgctacagggatatttcag

SEQ ID NO: 472 - DNA, 557 bp, Homo sapien
  misc_feature (1)...(557): n = A,T,C or G
cngagatgacatttacaatctcttgaaangcagcagatggcactctggtgcttcctatgaagcaacatgcttgaaatcaagggccaacaattgttgtaggaaagcaaaatatacctctaacacctacgtttaccaaaaaagctgacatctcaaactctgagttgttgagactcaaatttctcatccccaaagaagcctattacggtagtgtgntggatgctttttgtatctctgataggcaggcactataatggggggaaatacttctgaataaaaacattggctgtcttgcaactgtgcatataatgtctattcaagggggcagtgtgcctagcatgatcctgaaatgttgagataaaaggaagttggcattaaagcactatttgtcttatatgaaaagagtgactctatcttccagtaaacaaganttcctgcaatgaaaaagaaattttttccttcattatctataaactatacaaaataaccttcctttttaacctaagactcaaacattnatatttgattttattctatttgataccaattggtatgtccag

SEQ ID NO: 473 - DNA, 264 bp, Homo sapien
cctccatcaacagaaaggataaagaccccttcgggtctcctcattaattctgaactggaaaagccccagaaagtccggaaagacaaggaaggaacacctccacttacaaaagaagataagacagttgtcagacaaagccctcgaaggattaagccagttaggattattccttcttcaaaaaggacagatgcaaccattgctaagcaactcttacagagggcaaaaaagggggctcaaaagaaaattgaaaaagaagcagctcag

SEQ ID NO: 474 - DNA, 165 bp, Homo sapien
aattcagcttccagaggcccttattagtccttgttgacagaaacatagatttggcaactcctttacatcatacttggacatatcaagcattggtgcacgatgtactggatttccatttaaacagggttaatttggaagaatcttcaggagtggaaaactctccag

SEQ ID NO: 475 - DNA, 417 bp, Homo sapien
  misc_feature (1)...(417): n = A,T,C or G
aagttctcttcttgttttaaacacattcctgataacttctaaagatgaccaaaataaaacagaatatctacagagatcattttctgaattttttgtacatccaaggataacaacataaaaaaaataaaactggacagcattccacatccaagtgcacagaaccatttttgcaagattaaataatgtaaacattgggaacagccaaatcagcgaagaatgccaacacctcaaaacacctggtgttgccgcttcattaagtggttcaaaatccagatctataattgcgcaatattcaccgtatataaaaagaaatggatattaattttgacaaatagctgcaactgagacttctttttatttctttatatgngnatatagtgaatttttattatttttaaaattttatttattttttta

SEQ ID NO: 476 - DNA, 321 bp, Homo sapien
  misc_feature (1)...(321): n = A,T,C or G
catttaataacaaaaacaacctgtacggaaaacccnaaggcaaccacatagcatatgtaaaatgtgcaaatacactttaaaatgcangttattctatagcanttgcaagatagaatttcactgtaattagggaatctagctcatcctaacttaatagncttttgcatgtntagacaatgcaattctacaaggnacnactcagcgttgatgctaaagtatgaaacacatcctcagattattcatccgaaaatattaaaatagcntcatgttttattattctttaatgagtcntgagctcatttctaaagcttcataaagcat

SEQ ID NO: 477 - DNA, 546 bp, Homo sapien
  misc_feature (1)...(546): n = A,T,C or G
gctgtggttatattgtaaatgaagcatctaacatgtgcacaacttgcaacaaaaactccttggactttaaatctgtctttctcagtttccatgtgctgattgatctgactgatcacacaggcacccttcattcctgtagtctcacaggaagtgttgctgaggagactttgggctgcacggtacatgagtttcttgcaatgacaaatgaacagaaaacagcattaaagtggcaattcctcttggaaagaagcaaaatttatttaaaattcgttctatcacacagagcaaggagtggattgaaaattagtgtactctcgtgcaagcttgcagatcctactgaggcaagcagaaacttgtctggacaaagacatgtttaaaacggtctatcattttgaactctggaaaagtataagagttttaactccctttaaaatggaatattaatttgaaaattatggggaaaattgcattttgtttacatgtggtgaacatgtttctagaaattggtatggcgggaagggggctgggtgagtctgaaggacctcn

SEQ ID NO: 478 - DNA, 100 bp, Homo sapien
aagaaaagtggtaaaatcaagtcttcttacaagagggagtgtataaaccttggttgtgatgttgactttgattttgctggacctgcaatccatggttcag

SEQ ID NO: 479 - DNA, 508 bp, Homo sapien
  misc_feature (1)...(508): n = A,T,C or G
gnnttccaaattcttctaactcttccaaaagccttctgccttagttttttttaaattacaccagtccttttagtagctttttgatgtgatttttaaccaacttccccttctagcttcaagtattcttctaaattggtcctggtctacgtaaacaccctcatcttctcaagctttaccttctaacttctgcaccaccagaaattaaattgatgggcttttaaaataaattggttaccaataatttcctcattttttcagtgctattttatccaatttttggctttatatttttctatcttctatacttctccaatacttgtcttagcttgtttttcattttctatctgaaactcttgacaatatcttctaatttccctatcttctctattcttttcttcgccttcccgtacttctgcttccagntttccacttcaaacttctatcttctccaaattgttcatcctaccactcccaataatctttccattttcgtgtagcacctggncag

SEQ ID NO: 480 - DNA, 81 bp, Homo sapien
ggtgcccttttcctaacactcacaacaaaactaactaatactaacatctcagacgctcaggaaatagataaggaaaatgac

SEQ ID NO: 481 - DNA, 306 bp, Homo sapien
  misc_feature (1)...(306): n = A,T,C or G
tcgccttcggccgccgggcaggttaggggnacaagacgctacttcccctatcatagaagagcttatcacctttcatgatcacgccctcatagtcattttccttatctgcttcctagtcctgtatgcccttttcctaacactcacaacaaaactaactaatactaacatctcagacgctcagggaatagaaaccgtctgaactatcctgcccgccatcatcctagtcctcatcgccctcccatccctacgcatcctttacataacagacgaggtcaacgatccctcccttaccatcaaatcaattgg

SEQ ID NO: 482 - DNA, 582 bp, Homo sapien
  misc_feature (1)...(582): n = A,T,C or G
ggggggaacagtcattatacattatttagactcattccttcttccagtgcccttatgattatttcctacctttaccattgatcttaaactgngcaggctaaaaagaggaaccagaactcccttaagcacttttaagactatttaaaaaataaagntttgttggcattgaagagtaagctgcttaagggactgaatgaaaagatagtaccctttgtggctgtatgaagagagaaactgaatttctatccaagagaccttaatntagcctattagggaattatcttccccaaaagtacaagtaattttgcactgcaggagaaggataagtagatttgatttacatcacattttatacacacctttcaaganggagaaatctgcttcataaatagnaggaatctatgcttaaactnaacatttaatggtgacntcttacaacagccttgaaaannattggaantcngacntganggnggaaactggaanaaagaatatctttctcttctgcatcctttnatcctcaaacttagcatggattcacacgctgaggaaangttnggtnacnaccngaacatttagata

SEQ ID NO: 483 - DNA, 275 bp, Homo sapien
  misc_feature (1)...(275): n = A,T,C or G
gcctcactaaaataacagatttcagtatagccaagttcatcagaaagacccaaatggaatgatttacaaaatagaacactttaaaccaggtcagtcctatctttttgtagctgaaggctatcagtcataacacaatttcgcgtacacctctgctcattatggaattacacttaaaacgaatctcaagagggtgaccattgttgtttcagataccatccctaaggagagtggttaacaggaagattgccagngttactgatggaaagaagcgcttg

SEQ ID NO: 484 - DNA, 434 bp, Homo sapien
catatttccacaggccaatttctttctgtttttctgctaagctatttcagcattttagcttttcctctttgctttgtttactcatgattgccagatggctacgttacctctaagcatcagatcctcacaaattaatggttaaatgtaagggagggattttactctcttgcattaaaaaaaagctttattgagatataatttactgtaacattgactcatttaaagtatgctagtcaatagaccaaatcttgaataaactcccattcacaattgctacaaagggaataaaatagctgggaatatagctaacaagggaagtgaagggcctcttcaaggagaactacaaaccactgctcaagaaataagagaggatacaaacaaatggaaaaacattccatgctcatgaataggaagaatcaatatcgtgaaaatgg

SEQ ID NO: 485 - DNA, 291 bp, Homo sapien
  misc_feature (1)...(291): n = A,T,C or G
ncaccactgcagccctacatacagttgaaaaaaaattccattctgttaacatttgttttataagttttcacgcaatacacaaaaaacccctctgcacttcttgtaaagaacaaaaaagatacacaacagttaagcgtaaagatcacaggcaatagcattcaaacatggatgtgggtagagaaaggagtacctggcatgagtacctgcttagtttgactgaatccttgatttttaatttggcttttcatgggccgctcacaacaccaacgctgtgtgaggtatggtagtcag

SEQ ID NO: 486 - DNA, 274 bp, Homo sapien
ctgtaatattgtagttgctccagaatgtcaagggcagcttacggagatgtcactggagcagcacgctcagagacagtgaactagcatttgaatacacaagtccaagtctactgtgttgctaggggtgcagaacccgtttctttgtatgagagaggtcaaagggttggtttcctgggagaaattagttttgcattaaagtaggagtagtgcatgttttcttctgttatccccctgattgttctgtaactagttgctctcattttaatttcactgg

SEQ ID NO: 487 - DNA, 184 bp, Homo sapien
  misc_feature (1)...(184): n = A,T,C or G
tggcaccaagattctcagctcacggtaccagcatctgattgtcggactacctgctgctttccctgatatttatacatgatattcgnaaaatgtaaagaagctattattcatacagacatctagagaaggagngaagnttttaaaaaaataaaaaaatacttatttcaagctttagctgtgttct

SEQ ID NO: 488 - DNA, 393 bp, Homo sapien
ctgcatttttattgcgatctgcagatgaactggaaaatctcattttacaacagaactgggacagacgaccaccatattcactgaggtctaaatttgcagtttccactaatgacattttgatttcccaacagagatacttctggtcttactgcacagtcttttaagagaaatacttccattatgccacattgtccttgatccgtaagtgatgtgttaaggtgcttcaaaggaactctgacctctgaagtacttgagctactttagtatgtccagcctattgctttttgttttagtgtgtcaccataaatatcaggggcataaaaggctatctattcttaattcaaggataaaacagaagaagcttgtggtataaaacaatagttcaagatccag

SEQ ID NO: 489 - DNA, 607 bp, Homo sapien
  misc_feature (1)...(607): n = A,T,C or G
gtgcttatgtacttaaggggaactactctaactgggtgaagagtangatgaagcatccatgtccctacaaaggatatgaactcatccttttttatggctgcatagtattccatggtgtatatatgccacattttcttaatccagtctatcatcgatggatatttgggttggttccaagtctttgctattgtgaatagtgtcgcaatgaacatacatgtgcatgtgtctttatagcagcatgatttataatcctttgggtatatacccagnaatgggatagctgggtcaaatggtatttctagttctagatccttgtggaattgccacactgtcttccacaatggttgaactagtttacagtcccaccaacagtgtaaaagtggtcctatttctccacatcatctccagcacctgttggttcctgactttttaatgattgncattccaactggtgtgagatggtatatcaccgtgggtttgatttgcatttccctgatggccagtgatgatgaacnttttttcatgtggtttttggctgcataaatggcctgccttttntacttctataaaatttttcanntcttattattattcctgggggnttaag

SEQ ID NO: 490 - DNA, 179 bp, Homo sapien
  misc_feature (1)...(179): n = A,T,C or G
cttctaggaatactagtatatcgctcacacctcatatcctccctactatgcctagaaggaataatactatcactgntcattatagctactcccataaccctnaacacccactccctcttagccaatattgngcctattgccatactagtctttgccgcctgcgaagcancggtaggacc

SEQ ID NO: 491 - DNA, 399 bp, Homo sapien
  misc_feature (1)...(399): n = A,T,C or G
cctctacctgtaatcacattaatttttctaaagacaggggnggtgttttgaagataaatgtcattagtctatgataatagcatcataggacaattagccattttagacttgaccatattttctctttttagcatatagccatcttgatatttaggngggagactactccaatggagcaacagtttcattttacatgattggatttagaaatttacaaattttaaactcataagaattctaaataatttgaaaatggaaacatttgacccacagtctagcagcataaatacatttataaaatacttcattgttgatcttaggtcattgatttaaaacagaatttggtgactatgggcaggtggagggggccngtgaggaaggtataaaagagaaatcttt

SEQ ID NO: 492 - DNA, 482 bp, Homo sapien
  misc_feature (1)...(482): n = A,T,C or G
ctccaccttactaccagacagccttagccaaaccatttncccaaataaagtataggcgatagaaattgaaacctggcgcaatagatatagtaccgcaagggaaagatgaaaaattataaccaagcataatatagcaaggactaacccctataccttctgcataatgaattaactagaaataactttgcaaggggagccaaagctaagacccccgaaaccagacgagctacctaagaacagctaaaagagcacacccgtctatgtagcaaaatagtgggaagatttataggtagaggcgacaaacctaccgagcctggtgatagctggttgtccaagatagaatcttagttcaactttaaatttgcccacagaaccctctaaatccccttgtaaatttaactgttagtccaaagaggaacagctctttggacactaggaaaaaaccttgtagagagagtaaaaaatttaacacccatagtagg

SEQ ID NO: 493 - DNA, 207 bp, Homo sapien
  misc_feature (1)...(207): n = A,T,C or G
cataaatattatactagcatttaccatctcacttngnggaatgctagtatatcgctcacacctcatatcctccctactatgcctagaaggaataatactatcactgttcattatagctactctcataaccctcaacacccactccctcttagccaatattgtgcctattgccatactagtctttgccgcctgcgaagcagcggtagg

SEQ ID NO: 494 - DNA, 283 bp, Homo sapien
  misc_feature (1)...(283): n = A,T,C or G
ccaattgatttgatggtaagggagggatcgttgacctngtctgttatgtaaaggatgcgtagggatgggagggcgatgaggactaggatgatggcgggcaggatagttcagacggtttctatttcctgagcgtctgagatgttagtattagttagttttgttgtgagtgttaggaaaagggcatacaggactaggaagcagataaggaaaatgactatgagggcgtgatcatgaaaggtgataagctcttctatgataggggaagtagcgtcttgtagaccta

SEQ ID NO: 495 - DNA, 590 bp, Homo sapien
  misc_feature (1)...(590): n = A,T,C or G
tatgtatataattttcttagttactagcatagagaaattactgatttaaaaaaacatttcaaattctagcatgttgtaggattctattgccctttctaaaaagtacatcttgcttatccgatttctaacaaaactatttaatttgaagaagggagaatgaatttggataaaaagcaaaaatttaaaggtactcaaatttaggcaaaccattaaagcaatcttagtttacagttaattgggtagaatggtcaacactttcttcaggttagttcatggagtggatatgcattgatagaacaacttagagatgcttttacagttgagaaagctcattatatttgttatctttaagaatcagcttatttatttcatatgtttgttctttaagaagaccaaagagccctgcaaatgaatgttgatttgtttttttgtttgtttaatatttttgtagagataagatctcactttgttatgttgcccaggctggtctcaaactctcaacttgaagtgatctgcccacctcagcctcccaaagtggtgggattacaggcatgagccaccgcacctggacctgcccgggcggncgctcg

SEQ ID NO: 496 - DNA, 307 bp, Homo sapien
  misc_feature (1)...(307): n = A,T,C or G
ggagattagtatagagaggnanacnttttttcgngatatttggtcacatggataagtggcgctggcttgccatgattgtgaggggtaggagccaggtagttagtattaggaggggggnngttagggggtctgaggagaaggttggggaacagctnaataggttgttngntgatttggntaaaaaacantagggggatgatnctaataattantgctgtgggtggttgtgntgattcaaattatgngctttttcggaganncatgtcangtggtagtaaatataattgttgggaccattanttcttan

SEQ ID NO: 497 - DNA, 216 bp, Homo sapien
  misc_feature (1)...(216): n = A,T,C or G
cattttcctcttggtttcttcagttaagtcaaanngncacgttcctctttccccatatattcatatatttttgctcgttagtgtatttcttgagctgttttcatgttgtttatttcctgtctgngaaatggtgtttttttttgttgttgntggtttttttttttttttttaaactnggnaccncnaanttgaaaaaatgnttntttttccctnaca

SEQ ID NO: 498 - DNA, 375 bp, Homo sapien
  misc_feature (1)...(375): n = A,T,C or G
gaatttcctggcaccttttctcgctagagaagattnngtgtgactgggttgcctataagccatatagatacaaacttttatctctaataccaagtcttagagggatatattaatagatctaataaatttattcttagacttattgtttcatgggntagtgagtctttgctactggagacaatacagacttgtcagtttttttaaaaaaaaaaaatttgccaagctancacattaaaaanatntcctaaggctntcattttatgaggatgattataaacntttntgngataaatatcaccataataaactgttaagtacaactgcnggccncccttanagngaattcctncagttanaaatttatttttttgccaa

SEQ ID NO: 499 - DNA, 215 bp, Homo sapien
  misc_feature (1)...(215): n = A,T,C or G
ccacnaaagcagaagcttaaagcatagtagtaaagaggnnaaaaagaaggacgaaaataaatcagatgacaaggatggtaaagaagttgacagtagtcatgaaaaggccagaggtaatagttcactcatggaaaagaaattaagtagaaggttgtgcgaaaatcggagaggaagcttgtcacaaaaaaaaaaaaaaaaaaaaaaaaaaatgtttt

SEQ ID NO: 500 - DNA, 489 bp, Homo sapien
  misc_feature (1)...(489): n = A,T,C or G
ccactacgataagcaggtagctgggttttgtagtgagnttgctccttaagttacaggaactctccttataatagacacttcattttcctagtccatccctcatgaaaaatgactgaccactgctgggcagcaggagggatgatgaccaactaattcccaaaccccagtctcattggtaccagccttggggaaccacctacacttgagccacaattggttttgaagtgcatttacaaggnttgtctactttcagttctttactttttacatgctgacacatacatacactgcctaaatagatctctttcagaaacaatcctcagataacgcatagcaaaatggagatggagacatgatttctcatgcaacagcttctctaattataccttagaaatgttctcctttttatcatcaaatctgctcaagaagggctttttatagtagaataatatcagtggatgaaaacagcttaacattttaccatgctta

SEQ ID NO: 501 - DNA, 286 bp, Homo sapien
aaaaacactcaaacacagccttggagggaggagtcagttttaaaagactcttataaaagtaatatactgctagctctgaagaatcggaggctaaaatcatctcttcaagtccccagggaatcccaaagaactccaggggaaggtgggatgggccagagagctctggaagcttccaggtctgttgcaagcctcacctggtacacagtaggctcttccaggtctgtcaggaacccaggagcctcccctagcacacagtaggctcacaaaaagggagcactgctgctgg

SEQ ID NO: 502 - DNA, 168 bp, Homo sapien
  misc_feature (1)...(168): n = A,T,C or G
cctatgattgtgggggcaatgaatgaagcgaacagagnttcgttcattttggttctcagagtttgttataattttttatttttatgggctttggtgagggaggtaagtggtagtttgtgtttaatatttttagttgggtgatgaggaatagtgtaaggagtatggggg

SEQ ID NO: 503 - DNA, 173 bp, Homo sapien
  misc_feature (1)...(173): n = A,T,C or G
cctttataataaattaggcaaaaggttcagtgcnnggctatantggacaacatgaaactccataaaaatgactggatagggggactgcttgagacttttcttttgggcattactaacagaattcaaagaaattccaaccacgcttatttttccaaattctactgaaatgagag

SEQ ID NO: 504 - DNA, 310 bp, Homo sapien
  misc_feature (1)...(310): n = A,T,C or G
tagtattctatttaaaaattaagttttggggtctgtaaaatatacaggacaatgacttttttaaaatgtaagttaatacctcctcctcacttgtcttaattgaacttaggtgtttattcttaaaggnggaccttgatgaaaatgttgagatgggaagtgttattaggcaaaacttgttatagatttctcatataactcttaattgacccttagaattttaacaaccgcgcctggcccaatagactgttttttagagtanttttaggctctcancaaaattgaggggaaaatacagggtgttcccattaaa

SEQ ID NO: 505 - DNA, 530 bp, Homo sapien
  misc_feature (1)...(530): n = A,T,C or G
cctcagggaacttacaattatggcaaaaggggaaggggaagcaagcaccttcttcacaaggcatcaggagagagagagaaagagagtaggggaaactaccccttttaaaccatcatatcctgtgagaactccctcagtattagaagagcatgagggaaaccgcctccataatccaatcacctcccaccaggaccatccctcaatacatgggggttacaattcaagatgaggttcgggtggggatacagatttaaaccatatcagaatggttaatgatattgttgtattttaccaactataatcttcttagtgttatagtacaataatgtaaaaaattgagtaaatttgttttctatattattctgtttttggaaaacatgtatatagtcagggctgtttgtctcaagaaaatatggtaaactctgctgttttggtcactggtgcctagaatttggggatgtacattggttttgattcacatgcacatttccttctagttcacagtaactatttctaactatttcccnata

SEQ ID NO: 506 - DNA, 352 bp, Homo sapien
  misc_feature (1)...(352): n = A,T,C or G
cttgaacgctttcttaattggtggctgcttttaggcggtactatgggtgntaaattttttactctctctacaaggttttttcctagtgtccaaagagctgttcctctttggactaacagttaaatttacaaggggatttagagggttctgtgggcaaatttaaagttgaactaanattctatcttggacaaccagctatcaccaggctcggtaggtttgtcgcctctacctataaatcttcccactattttgctacatagacgggtgtgctcttttagctgttcttaggtagctcgtctggtttcgggggtcttagctttggctctccttgcaaanntatttctagttaatt

SEQ ID NO: 507 - DNA, 370 bp, Homo sapien
  misc_feature (1)...(370): n = A,T,C or G
cctaactagatcttatcagaataggggggaagggngtcggttcatccttattgagtgttaatgaccctgtaagatgtaatttcttttatttcattctgttacctagaaaatctatcacagccttgtagtattgattgctcaatctataaagagctcagtttacagcatgactgttagtaacagggntattttaatgagtgactcttcaacacctcagagtttcactaaattccaacccatcagcccagtagtctaacattaagggtcttaggaaatgagaacttatcacctttccttatcatgaaaaggtaacctccaggtaaccaaaaatagaacttcctctgtgttcgttttttatagaaattactgg

SEQ ID NO: 508 - DNA, 129 bp, Homo sapien
  misc_feature (1)...(129): n = A,T,C or G
ctgttaaaagaacaaacttagcaatatataacagttnggtaacaggatttttgactattcactttgggagttatttttaaaaatccacttttttactgagtcttactacataccaggcactgtacttgg

SEQ ID NO: 509 - DNA, 422 bp, Homo sapien
  misc_feature (1)...(422): n = A,T,C or G
ntgggaagtcgtgacatccatgggaacccagcgctgtgatgctggtgtttgngttctccgcgagaagtgaccattgttggagcaccatccagagctagtgaccantncagtggacagttagtgggagaatcaaaaatcctttccagaatgtctgtttctcactacntgcaccgggngattacaggcaccagtgcagngatgattgtacttatttgacacatactccccgtcntcctggntnttgttcctganaanggtgggtaaatattccaggaaaaanaatgcacattgaatggatgtgagagaccacattgcctctcccactgctttggggagcactttcctgtcatttctaacttaccacntgcttggtgtactatatgtatgttgtgcctcatatgttgcaaagaactaangtgagt

SEQ ID NO: 510 - DNA, 238 bp, Homo sapien
ccacctatgaattggtggtttacctactcaatggatagcagcacgaggactgctgtactgcacaaaaagaagaccaaaagattacagtggaccatgggatacagaagccagcatggcagacagaagaaaaatagtttgggaacatgtaactatcctaagtggaagttttgttgtaggaattatagtaatcacaccacattacttggcctttcggtaatgtgaaaaaaaaaaaaaatcc

SEQ ID NO: 511 - DNA, 254 bp, Homo sapien
  misc_feature (1)...(254): n = A,T,C or G
ccnattgatttgatggtaagggagggatcgttgnggctcgtctgttatgtaaaggatgcgtacggatgggagggcgatgaggactaggatgatggcgggcaggatagttcagacggtttctatttcctgagcgtctgagatgttagtattagttagttttgttgtaagngttaggaaaagggcatacaggactaggaagcacgataaggaaaatgactatgagggcgngatcatgaaaggtgataagctcttct

SEQ ID NO: 512 - DNA, 269 bp, Homo sapien
  misc_feature (1)...(269): n = A,T,C or G
cctacctgtaaactacagtactttatatatctatgggnttaataaaaanaaaatccacaaatcttaaaaaggaactttaaatgcagggctatattgaattggnaaactgcaacacaaactggcgcaacataggtaaatgaataccaatctcactctatgtgatgcaagcatgctactttcccactaatttaaattactttcaaccactatgagccagaatgcatgcctgaaccttaaactgcactttaaaaagtaacatcttggcctaa

SEQ ID NO: 513 - DNA, 266 bp, Homo sapien
  misc_feature (1)...(266): n = A,T,C or G
ggaggggggttgttagggggtcggaggagaaggntggggaacagctaaataggttgttgttgatttggttaaaaaatantagggggatgatgctaataattaggctgtgggtggttgtgttgattcaaattatgtgntttttggagagncatgncantggtagtaatataattgttgagacgattagttttagcattggagtaggtttaggttatgnaccgtactctaggccatatgtgttgganattganactagtagggctagg

SEQ ID NO: 514 - DNA, 271 bp, Homo sapien
  misc_feature (1)...(271): n = A,T,C or G
acatgcaanaaatcgagaatcttaaaaaacannacgaanctgccctggaanncttactggnntangatatttatnttgcggctgagatacttgaacaacttcggatcngaantagacaanaangggnanttntatactgcnncagaggttacacagntcattgtattagagangaacanatgggtctggtgttcacacattggggggaanatgggcgtnnacangagaggnnganaaacnanganagcctncctggttngcataanaaaaa

SEQ ID NO: 515 - DNA, 328 bp, Homo sapien
  misc_feature (1)...(328): n = A,T,C or G
ccaatgaggggcaaagtgagcgncnagaagangttttgactgaaataaatcaaacacaaaaatntaagttcacagtgacagtttaaacaaaatccaaacaaactaacaacanaaacaccccttgntttgcctctagtggaaggtggganaacacaanctcgtcctaaaaattgactagtaaaggggaaaacccggtcatttncctactctttccangaaatatctaatgcaagaaagaacttctnctcattatacngaaggaatttngaaaaatgatgtatttttggaacacctaantgaaatactggaacctgggcaagttcaccac

SEQ ID NO: 516 - DNA, 220 bp, Homo sapien
  misc_feature (1)...(220): n = A,T,C or G
ncctnagttgaaggaccccatgtacatacaggccaggggagcagtactaggntaactagaaggatctcatccccatatgtgggctcatttcaagtctatggatgactaccttcattgntgtgtgcgagatggtttcaccccttgaaaatatgggcacttcancataanatagcnaaatctttataatgatcaatncatcctacctccttttacatgcatg

SEQ ID NO: 517 - DNA, 296 bp, Homo sapien
tgcgatttcttccttgttgtttgctttggtctgtgttcaatccagagagcttaaattgtcattattttgggaagaaaacctgtatttttgttagtttacaatattatgaaatttcacttcaggagaaactgctgggcttcctgtggctttgttttcttagtttctttttccgtgccgtgtattttttaattgatttttcttcttttacttgaaaagaaagtgttttattttcaaatctggtccatatttacattctagttcagagccaagccttaaactgtacagaatttccactg

SEQ ID NO: 518 - DNA, 299 bp, Homo sapien
  misc_feature (1)...(299): n = A,T,C or G
gaagatagaaaaatataaagccaaaaattggataanatagcactgaaaaaatgaggaaattattggtaaccaatttattttaaaagcccgtcaatttaatttctggtggtgcagaagttagaaggtaaagcttgagaagatgagggtgtttacgtagaccagaaccaatttagaagaatacttgaagctagaaggggaagttggttaaaaatcacatcaaaaagctactaaaaggactggtgtaatttaaaaaaaactaaggcagaaggcttttggaagagttagaagaatttggaagg

SEQ ID NO: 519 - DNA, 464 bp, Homo sapien
  misc_feature (1)...(464): n = A,T,C or G
gctgcacatcggaggaaaactcggtaaagcagaatgaggttgatatgttgaatgtatttgattttgaaaaggctgggaattcagaaccaaatgaattaaaaaatgaaagtgaagtaacaattcagcaggaacgtcaacaataccaaaaggctttggatatgttattgtcggcaccaaaggatgagaacgagatattcccttcaccaactgaatttttcatgcctatttataaatcaaagcattcagaaggggttataattcaacaggtgaatgatgaaacaaatcttgaaacttcaactttggatgaaaatcatccaggtatttcatacagtttaacagatcgggaaacttctgtgaatgtcattgaaggtgatagtgaccctgaaaaggttgagatttcaaatggattatgtggtcttaacacatcaccctcccaatctgttcagttctccagngtcaaaggc

SEQ ID NO: 520 - DNA, 221 bp, Homo sapien
ctgatatctacttatttaacacaagtctctaatacaatacaattttattaattttattccacatgccccacattagatctctagactcattcatcctacatacctactttgtatcctttgacctacatctccctacttcctcctccagtccccaccccccacccactggtgctaaccactgtttcattccctttttcattctacatatgtgagatcatgct

SEQ ID NO: 521 - DNA, 312 bp, Homo sapien
  misc_feature (1)...(312): n = A,T,C or G
ctgatagctttctcttcgcctagattaatatcttctnncttcccattcacagcccccaccgacatcaaagctttgctgttttatctgtcaaaaatgtcttcacacttttcattcttaaataaaagtgctgagtaaggacattttcacaacaaatttttattttacaaaacttacaatgatttgaatccaaaacaactttcattatttaactgtaaagtaaatatatattttattaggngtgtcttagttcattttgtgctgctttaacagtgtatccttgtgatagttgtggggtgggggaggggggaagga

SEQ ID NO: 522 - DNA, 336 bp, Homo sapien
ccttctttccccactcaattcttcctgccctgttattaattaagatatcttcagcttgtagtcagacccaatcagaatcacagaaaaatcctgcctaaggcaaagaaatataagacaagactatgatatcaatgaatgtgggttaagtaatagatttccagctaaattggtctaaaaaagaatattaagtgtggacagacctatttcaaaggagcttaattgatctcacttgttttagttctgatccagggagatcacccctctaattatttctgaacttggttaataaaagtttataagatttttatgaagcagccactgtatgatatttttaag

SEQ ID NO: 523 - DNA, 172 bp, Homo sapien
  misc_feature (1)...(172): n = A,T,C or G
ngacnggcncntggctatgtntatagatagggctttaaccactatctgngaagcangagngacannattcttgctctcacatnccacngganacgtatttctcttctcttacnagcgaagaaccatctntttctaaagcccccattctattgcccttgcttttctctggctt

SEQ ID NO: 524 - DNA, 471 bp, Homo sapien
ccagacctgcagaaaaacttagcacagctcaatctgctgttttgatggctacagggtttatttggtcaagatactcacttgtaactattccaaaaaattggagtctgtttgctgttaatttctttgtgggggcagcaggagcctctcagctttttcgtatttggagatataaccaagaactaaaagctaaagcacacaaataaaagagttcctgatcacctgaacaatctagatgtggacaaaaccattgggacctagtttattatttggttattgataaagcaaagctaactgtgtgtttagaaggcactgtaactggtagctagttcttgattcaataagaaaaatgcagcaaacttttaataacagtctctctacatgacttaaggaacttatctatggatattagtaacatttttctaccatttgtccgtaataaaccatacttgctcaaaaaaaaaaaaaaccttc

SEQ ID NO: 525 - DNA, 332 bp, Homo sapien
  misc_feature (1)...(332): n = A,T,C or G
ccccnctgtattccagcctgggtgaccccatctcanggaagaaaagttaccagatgtcgngggtaaaggttggtcttcaagtggcctcataagttgtcttgcatttaaattcagggaattcattggaccaataggttacattttcgttccttttttgttttggttcatctgttaagcagtgggggcctaattactgctcctttgtaaaaacacattttcccaaagaacactgaattaccgttcaaactggttgttgatgggtaataagggctgtttttgctgccccaaaagggcttaacaatttaggcggatagtttacttaaaaaaaaaaa

SEQ ID NO: 526 - DNA, 440 bp, Homo sapien
  misc_feature (1)...(440): n = A,T,C or G
ccaggttacctcccctaacagatgtggtgttctgangggttggttaagtgcccgaggaaaataggccttaactgttaacatctacagagaagaaagcatggtcacactggcaaggagtaagaagggattgggtaaaagaaaatgggagagaaaagggaaaaaagttttggcaagacaattgttccctgctaagaagctgcagggtgaaagctttcctttcttctatttttgtttttaatgnctgtctctctgatcagnggaaaagtgaaaatttctagtatctagcactaacgtatgacccaactttgagggatcacaagctagaacaagttgaggatttaaaatcctggataattatatacttaaagttcatgagcataaagctcacttgaccatgcagaaatgctgggaagcagggtgcatggcatgggaatacatct

SEQ ID NO: 527 - DNA, 124 bp, Homo sapien
  misc_feature (1)...(124): n = A,T,C or G
tttccatatgtctgttgggtgcataaatgncttcttctgagaagtgtctgttcctatcctttgccccctttttgaggacttaaatgttagacctaagaccataaaaaccctagaagaaaaccta

SEQ ID NO: 528 - DNA, 162 bp, Homo sapien
  misc_feature (1)...(162): n = A,T,C or G
ctgcgggagaaatatggggacaagatgttgcgcangcagaaaggtgacccacaagtctatgaagaacttttcagttactcctgccccaagttcctgtcgcctgtagtgcccaactatgataatgtgcaccccaactaccacaaagagcccttcctgcagcag

SEQ ID NO: 529 - DNA, 409 bp, Homo sapien
  misc_feature (1)...(409): n = A,T,C or G
cctttaaaatatagcttataaaatgtatactatnngccaggagagctcacatttttctgcagttttccagtggacctgcctatggaatactgtaaagaaaaatctgcaaaaatattcctagcaattgaatcagtgcttttaaataaaagaagtggagaggggcttggttaaattattctgacaagttttcttgctagtggttgccaaaattaaggatatttgaagtgtcctatcacccaaatttggctttaagaaaaagctatattctgngtctatagggtgaagcccacactatctgtgctgcattctcaatgatacaatacctatctggaaactttcctgttttgccaatgggtgcacaaatctaaaacattttatcacaaaaggtacttgaatttaaatttctttt

SEQ ID NO: 530 - DNA, 325 bp, Homo sapien
  misc_feature (1)...(325): n = A,T,C or G
ccgccagtgtgatggatatctgcagaattcgccctttcnagatttgngcccgggcaggtccatggctaggattatagatagttgggtggttggggnaaatgagtgaggcaggagtccgaggaggttagttgtggcaataaaaatgattaaggatactagtataagagatcaggttcgtcctttagtgttgtgtatggctatcatttgttttgaggttagtttgattagtcattgttgggtggtaattagtcggntgttgatganatatttggaggtggggatcaatagagggggaaatagaatgatcagtactgcggcgggtagg

SEQ ID NO: 531 - DNA, 173 bp, Homo sapien
  misc_feature (1)...(173): n = A,T,C or G
ccaattgatttgatggtaagggagggatcgttgaccncgtctgttatgtaaaggatgcgtagggatgggagggcgatgaggactaggatgatggcgggcaggatagttcagacggtttctatttcctgagcgtctgagatgttagtattagttagttttgttgtgagtgttag

SEQ ID NO: 532 - DNA, 395 bp, Homo sapien
  misc_feature (1)...(395): n = A,T,C or G
caggtcctactatgggtgttaaattttttactctctctacngggttttttcctagtgtccaaagagctgttcctctttggactaacagttaaatttacaaggggatttagagggttctgtgggcaaatttaaagttgaactaagattctatcttggacaaccagctatcaccaggctcggtaggtttgtcgcctctacctataaatcttcccactattttgctacatagacgggtgtgctcttttagctgttcttaggtagctcgtctggtttcgggggtcttagctttggctctccttgcaaagttatttctagttaattcattatgcanaaggtataggggntagtccttgctatattatgcttggntataatttttcatctttcccttgcgg

SEQ ID NO: 533 - DNA, 290 bp, Homo sapien
  misc_feature (1)...(290): n = A,T,C or G
ctgaaccattatgggataaactggtgcaaattctttgccttctctacttctcactgattgaacataagcttccagggctcccctgaaaaccaaaatgaaaacaatgtcaaaatattagataaatcacataaaacagttaaggggataccaatatataaaaattattaggtaagctcatttctggaactgttaatgctcggtttcacaatccaagnngaccaacagccttcactcagntactggnagtgntactatggttactacngntactacctttagtgtnaaaaact

SEQ ID NO: 534 - DNA, 334 bp, Homo sapien
  misc_feature (1)...(334): n = A,T,C or G
ccgccagtgtgatggatatctgcagaattcgcccttagcgagnnagccgggcaggtccatggctaggtttatagatagttgggtggttggtggggnatgagtgaggcaggagtccgaggaggttantttgtggcaataaaaatgattaaggatactagtataagagatcaggttcgtcctttagtgttgcgtatggctatcatttgttttgagggtagnttgattagncattgttgggnggtaattantcggctgttgatganatatttggaggtggggatcaatanagggggaaatanaatgatcagtnctgcggcnggtnngacctcngccc

SEQ ID NO: 535 - DNA, 557 bp, Homo sapien
  misc_feature (1)...(557): n = A,T,C or G
nccataagcttcagtgcgcaaaaggtcaaggccagtgttaatttgttatttcttaaataactttccctttcatttttaaattataaatttaacttctaacatgttttatggttaaaattgtacttttttcctttagcgacattcaaatgcatcacaatcactttgtgaaattgttcgcctgagcagagaccagatgttacaaattcagaacagtacagagcccgaccccctgcttgccactctagaaaagtatgtgtaaaactctgttcttgttcttctttcatattgatgctgttccatgtgttaccattgtgagtggttggtaagtgttccttatgtgggaatcatgtgccttgaaaataaccttgggtgggtgagaaggtagggaaacctgcttcttttatctcaagtaaaagttttggcagggtaaagaagataaatgacatttatatctagacttttgagttttccaattatttggtaaaaatgggaaattctgtagaagcccttccttaaaaatgggggaagtccatttnanaaaattaactggtaggtca

SEQ ID NO: 536 - DNA, 372 bp, Homo sapien
  misc_feature (1)...(372): n = A,T,C or G
gttccaaccttcatttctgaaactgttctagagcacngtgtctttctcgtagttcataacttaccccttcagtctagaattagaattacattatctgttttactactttactagactgtaagctcctagaagataaggactagggagttcatctctgtattccaccagaaggtacagtgactcatatctagagtctttagatgaaacttactgagttgaataacttaatatatttctgttttcattcccaagggaggccatgtctggagatagaccttgaatttaataaattttaggcactataccatttcagtggagaaaattgttgggaaatttggggggatggatatataagggggaggaagtcactgg

SEQ ID NO: 537 - DNA, 284 bp, Homo sapien
  misc_feature (1)...(284): n = A,T,C or G
ccttctgatgcaaacagaaaggaaatgttgtttggangccttgctagacctggacatcctatgggaaaatttttttggggaaatgctgagacgctcaagcatgagccaagaaagaataatattgatacacatgctagattgagagaattctggatgcgttactactcttctcattacatgactttagtggttcaatccaaagaaacactggatactttggaaaagtgggtgactgaaatcttctctcagataccaaacaatgggttacccagaccaaactttgg

SEQ ID NO: 538 - DNA, 293 bp, Homo sapien
gtacatagtaggtgtatatatttatgggctatataagatgttttgatacaggcatgtaatgtgaaacaagcacatcaacaagaatggggtatccatcccctaaaacatttgtcctttgggctacatgtcatttcctaatgtaaagaaaatggacagacagaaccaacattgatttgactgggtgaaaaagtccatttgagttgggagcaggggttgtgttcctggatttgggttgttaggacagtgtaaaaaggcttcacaggggaacattcttttctgataaaggaaagcag

SEQ ID NO: 539 - DNA, 468 bp, Homo sapien
  misc_feature (1)...(468): n = A,T,C or G
tttcnataaactttatttttagagcagttttaagnnggtagcaaaattgattagaaggnacagagatgtcccatacacctcctactcccacacatgcacagccttccccattatcaatagcccccaacagagggatacatttgttaacaactgacgaacctacatatcattatcacccaaagtccacagtttatattattccttctggagaattttcaaatacagaaattcctctaccaggaataaactancaatttcctctcggctttctataaatttaattattatttcagaaattagcctatctttacaggagaaaatgttataaaccatgaaaagactatcaaatacacaaggaagtgaatgntatataaaaaatgtaccatctcctaaacaactacctgcattcccttcttgttggtaagttataatttgnnatagttctgatcatctgtttaattaatttgc

SEQ ID NO: 540 - DNA, 397 bp, Homo sapien
  misc_feature (1)...(397): n = A,T,C or G
ctgttttattaattcccccatttgcagcacacttntctcttccaacattcatcagtcagatcagagtccacggtcttttcaaaatttagataaactggcttacattttgtaatgatgtccccagacaacaccccactccaacccattctgtttgttactattagtttacaacatgcatgtgcctttactttcattttcatagtatttaaaaatggaagggcactcccaaatttactttaacccctttaataatctctctcctcctgctctctctggtcctccagacaactgttgatttactttcctttatgatggattagtttgcattttctagaattttatatgactgacatataaagnttttatgtttctcccctttgggtttcttcatgtggca

SEQ ID NO: 541 - DNA, 248 bp, Homo sapien
cctagataggggattgtgcggtgtgtgatgctagggtagaatccgagtatgttggagaaataaaatgtgcatagtgggggttttattttaagtttgttggttaggtagttgaggtctagggctgttagaagtcctaggaaagtgacagcgagggctgtgagttttaggtggagggggattgttgtttggaagggggatgcgggggaaatgttgttagcaatgagaaatcctgcgaataggcttccggc

SEQ ID NO: 542 - DNA, 366 bp, Homo sapien
  misc_feature (1)...(366): n = A,T,C or G
aatcggccctctagatgcatgctcgagcggccgccagtgtgatggatatctgcagaattcgcccttgagcgatancgcgggcaggtccaattgatttgatggtaagggagggatcgttgaccncgtctgttatgtaaaggatgcgtagggatgggagggcgatgaggactaggatgatggcgggcaggatagttcagacggtttctatttcctgagcgtctgagatgttagtattagttagttttgttgtgagtgttaggaaaagggcatacaggactaggaagcagataaggaaaatgactatgagggcgtgatcatgaaaggtgataagctcttctatgataggggaagtagcgtcttgtanac

SEQ ID NO: 543 - DNA, 460 bp, Homo sapien
cctactatgggtgttaaattttttactctctctacaaggttttttcctagtgtccaaagagctgttcctctttggactaacagttaaatttacaaggggatttagagggttctgtgggcaaatttaaagttgaactaagattctatcttgggcaaccagctatcaccaggctcggtaggtttgtcgcctctacctataaatcttcccactattttgctacatagacgggtgtgctcttttagctgttcttaggtagctcgtctggtttcgggggtcttagctttggctctccttgcaaagttatttctagttaattcattatgcagaaggtataggggttagtccttgctatattatgcttggttataatttttcatctttcccttgcggtactatatctattgcgccaggtttcaatttctatcgcctatactttatttgggtaaatggtttggctaag

SEQ ID NO: 544 - DNA, 116 bp, Homo sapien
  misc_feature (1)...(116): n = A,T,C or G
ccgccagtgtgatggatatctgcagaattcgccctttggagngctngcgcccgggcaggtctgtttcagcagctcctccttcttcttcccgcgangatctcgagccttgatcttgg

SEQ ID NO: 545 - DNA, 380 bp, Homo sapien
  misc_feature (1)...(380): n = A,T,C or G
cgacggatcgatnagctngatatcgaattcggacgagcatggcgtattgctgcagatatggattcttcagaatgctccatgacaaatgtactgacgggaagncnatctaaaggaggcattgtnatgagagaaaggtctcgagctccagataaagagagatacagagttcttggaattggagttgcagaaacagtaagacaatcgattgtggggaagcgttcttttagagaatctttggccttcactccaaagcgttgttcttcatcaataataagtagctcgtgccgaattcctgcagcccgggggatccactagttctagagcggccgccaccgcggaggagctccagcttttgttccctttagtgagggttaatttcg

SEQ ID NO: 546 - DNA, 418 bp, Homo sapien
ccagggcaattaggcaggagaaggaaataaagggtattcaattaggaaaagaggaagtcaaattgtccctgtttgcggatgacatgattgtatatctagaaaaccccattgtctcagcccaaaatctccttaagctgataagcaacttcagcaaagtttcaggatacaaaatcaatgtacaaaaatcacaagcattcttatacaccaataacagaccaacagagagccaaattatgagtgaactcccattcacaattgcttcagagaataaaatacctgggaatccaacttacaagggatgtgaaggacctcttcaaggagaactacaaaccactgctcaaggaaataaaagaggatacaaacaaatggaagaacattccatgctcatgggtaggaagaatcaatatcatgaaaatgg

SEQ ID NO: 547 - DNA, 172 bp, Homo sapien
cctgaggttgggagaaattttgtccatttctttagaaccaaaattggcaaccagagagtatttggatgttacacaaaatatctagtttccctttctagcctaaattgggttgtttatagcacccgtctctccatttgagaaaaatggttaggatgctggtgcagggatgagg

SEQ ID NO: 548 - DNA, 367 bp, Homo sapien
  misc_feature (1)...(367): n = A,T,C or G
ggtctgacttaagagaaacaatggaaggcaagaggcagtagaataatatattcaaaagatgcaaaggaaaaaaacctctcagccacgaattccttatccagcaattatttttcaaaaatgaaaataacacaaagacttagccagataaacagaaacattaactgaagttgttgctggcagacctaccatataaaaataaaaaactctaaaaaaattcctatggctaaaagcaagttacagaagacagtcacttgaatccacattttaaaaaaagcactgatatacgtaatattgacattataaaagacagtaaaaatgcatttcttctttataataaatngcttattaaataacatgtgtataatgg

SEQ ID NO: 549 - DNA, 418 bp, Homo sapien
ccaaatcagaacctagagtgagcattctataaactcacctttgctttgatccttgaagatcacaagttttgatactgttgaaatctctactctttcaacactttaattaaatggcatttagaatttcatatacttctgttgttgtttccacaatcttaaactggatttagaaatacttataatgtaaatgcaagagctttaacttagtaaccgtatttcctattttttgttgtttttcttttgccagaatttctgtttgtctacaataaagtccagcgaaatacagtatttggttaggttacttgttaacataaaattttatcatttgtagagtttttacttaaccttcctattctctagtctctataatctttcaatgaagataaccagttacgaatatctcctataccatattagg

SEQ ID NO: 550 - DNA, 234 bp, Homo sapien
  misc_feature (1)...(234): n = A,T,C or G
cctacccgccgcagnactgatcattctatttccccctctattgatccccacctccaaatatctcatcaacaaccgactaattaccacccaacactcacaacaaaactaactaatactaacatctcagacgctcaggaaatagaaaccgtctgaactatcctgcccgccatcatcctagtcctcatcgccctcccatccctacgcatcctttacataacagacgaggtcaacgat

SEQ ID NO: 551 - DNA, 542 bp, Homo sapien
  misc_feature (1)...(542): n = A,T,C or G
cacccctaccccnntcctcataaaagttnctctccctggatcctctttttccctcatgagtgcccggttgcccaagtcaaaaacctgggagtgatataaactccccacacatccagtcagtcactcatcaactctattgattctgtctgctaaatatatntcaattgtattaacttaaacatatgcatanggcactttcttcttcactgcatttttgtgggctgcacttacctttcaggtaacgacaacactggcccctcttgcccttctagtcagaagtgccaaaatgatgagagctagccatgacaaacccacagccaacattacactgaatgtgcaaaactggaagggcatccaaacagaggaggggagagaggaatagacaggaagtcaaactgtctctgtttacagatgacatgtttctatatctataaagccccatagtcttggccccaaagcttcttctgctgataaactttagcaaagtcttagcatacaaaatcaatgtgcaaaaattactaacagtcctatacatcaagtca

SEQ ID NO: 552 - DNA, 411 bp, Homo sapien
  misc_feature (1)...(411): n = A,T,C or G
cctggntgacaaggaggtgcctgtnatgtgaagatttgaggaaagagcattccaggcagggggaaggcttgatgcaaagggtctactgcaggcattagctgagcttatttaaagatcagaatgaaggccattgtggctagaacagagtggacaggaaggaatggtaccaggcaaagctgaagaagttggcaggattgagctctcataantcatggcaaagagttcccatttcattgtttgacggaaataaattggaaggtcttaagtaggagaagatttgattagatttacattttacgaagaagcactctggatgttatgtgaagaaatggcctttgcagggcaagggtggaaacaaagagatcagttaggaaattattggagtagctgaggattggatgaggggatgtg

SEQ ID NO: 553 - DNA, 631 bp, Homo sapien
  misc_feature (1)...(631): n = A,T,C or G
ccgggattagaactaaaacaagtgagatcacccctctaattatttctgaacttggttaataaaagtttataagatttttatgaagcagccactgtatgatattttaagcaaatatgttatttaaaatattgatccttcccttggaccaccttcatgttagttgggtattataaataagagatacaaccatgaatatattatgtttatacaaaatcaatctgaacacaattcataaagatttctcttttataccttcctcactggccccctccacctgcccatagtcaccaaattctgttttaaatcaatgacctaagatcaacaatgaagtattttataaatgtatttatgctgctagactgtgggtcaaatgtttccattttcaaattatttanaattcttatgagtttaaaatttgtaaatttctaaatccaatcatgtaaaatgaaactgttgctccattggagtagtctcccacctaaatatcaagatggctatatgctaaaaagagaaaatatggtcaagtctaaaatggctaattgtcctatgatgctattatcatagactaacgacntttatcttcaaaacaccaaattgtctttagaaaaattaatgtgattacaggtagagg

SEQ ID NO: 554 - DNA, 558 bp, Homo sapien
  misc_feature (1)...(558): n = A,T,C or G
ccaggntagtctccaactcctgaccttagctgatccacccacctcggcctcccaaagtgctgggattacaggcatgagccactgcgcccggccaaacttgatatgcatttttaaataagttaatacattattcatggtttagtctcattatatattctatggtccactttgaaatttcatctaaccaaaatcatcttcatcctgcaatttgaggtttggacacaatggggattgatcagtaatttcttcatatgccctttctcaaggaaatagtttcctatgaaaaaaaagtcctatgttttcatgtaagttctctttttggagaagaaaaggagacattcttacttagcactctcagttttacaaaacgctgccaaccttaaaatttgtctattgattcccaaggcacacaaccaatagtctgtcaataacccggaataacatttctttaaggccccagtaactttcacatgtttgggttccaatcctcacctagaatcttgttaagaaaagtaaaccattcactcctctagaaactctaaggttgcttcttagggg

SEQ ID NO: 555 - DNA, 212 bp, Homo sapien
ccaggtatttgcataatggcttttcttctgttgcctttgttcctttgtggccccagctaattgcctgagagtgccactgttagttttcaactctttctgatagaaaccctgtgtactaacatggaaatcttaggtaatctgctttttcaaagcacaatgcagaatttattggcggtggtgtaactttaagaatatccgagaagccaccaagg

SEQ ID NO: 556 - DNA, 219 bp, Homo sapien
  misc_feature (1)...(219): n = A,T,C or G
ccatgtgtctatctggagagaaggggaaacagcaagtgcaaaggccctgagatggaacatatctggagaattcgaagaatggtaagaaggccagagtggagcagaacaagtgtgggagagagttgtaggagatgagatcaaaggctaggaatgaagtgtaaggccatgtcatgtgaccttgtatgtccttgtaaggcttttttttttttttttnancct

SEQ ID NO: 557 - DNA, 482 bp, Homo sapien
cctactatgggtgttaaattttttactctctctacaaggttttttcctagtgtccaaagagctgttcctctttggactaacagttaaatttacaaggggatttagagggttctgtgggcaaatttaaagttgaactaagattctatcttggacaaccagctatcaccaggctcggtaggtttgtcgcctctacctataaatcttcccactattttgctacatagacgggtgtgctcttttagctgttcttaggtagctcgtctggtttcgggggtcttagctttggctctccttgcaaagttatttctagttaattcattatgcagaaggtataggggttagtccttgctatattatgcttggttataatttttcatctttcccttgcggtactatatctattgcgccaggtttcaatttccatcgcctatactttatttgggtaaatggtttggctaaggttgtctggtagtaaggtggag

SEQ ID NO: 558 - DNA, 679 bp, Homo sapien
  misc_feature (1)...(679): n = A,T,C or G
ctgtnaaaattctgaacctatccccaaaagaaaaaccgtgaaatacaagttttaggaggtggagcaaagaaaagccaagttatttaaaaccaataaacacaagagacaattctgctggagaatttactttctccaaaacatcaaatggactttaaagcagaagaccacattttatgagaaagttatgtcactgaaaagcttcatgtaaagtgactttgtaaatggaatatttttaaatgataaaaagaaaataacttttccaggaatcctttggagaggctgataaccagatattaaattatcaattttgccaaagtggacttttaaaaaatgtgttacttttaaaaactaacttgaaagaatttatgaggcaatctatctgagtatgtttattgttgctccattggctttcaggattttggtcatttcactgttaactcttacatcagagaataaagaaaagaaaatgaaactttgttaggaactgggatggaaaatgtagtcccagacagatctactgacctcgactgagtttcagaaatatcccaggattttggttattcatgcctttcttttgtgactttctttcaaattagccaattaaagataccccttcaatcaccggtgacatcagtacaacagtttttcaacagttttctctctcctgaccaaacagttt

SEQ ID NO: 559 - DNA, 488 bp, Homo sapien
  misc_feature (1)...(488): n = A,T,C or G
ccccactgtactccagcctgggtgaccccatctcaaagaagaaaagttaccagatgtcatgggtaaaggttggtcttcaagtggcctcataagttgtcttgcatttaaattcagggaattcattggaccaataggttacattttcgttccttttttgttttggttcatctgttaagcagtgggggcctaattactgctcctttgtaaaaacacattttcccaaagaacactgaattaccgttcaaactggttgttgatgggtaacaagggctgtttttgctgccccaaaagggcttaacaatttaggcggatagtttacttaaaaaaaaaaatcctttggagacatactgaaaatgcaaactagtttctaaattatcaattccctacatgaanaagcagtttgccanagtttagtctcanaaaatgactggttggctctatttaaatcanaacccaatttctacgcacctgcccgcccggccaagggc

SEQ ID NO: 560 - DNA, 602 bp, Homo sapien
  misc_feature (1)...(602): n = A,T,C or G
cctanttaagaattccttgccttagtggtgaacaaggactaaacacagacaatgggtgaaacacagacgctaattcacataacagagagtaggcaaccttaagaatgaattgatgcagactcctatagaattcctctgttatgactgggttcttattttctcctccttgtatgtagttgaaatttcatcattatgaatagttccttggatctttttttaaagttgtgaatgcgagtgtttggctttgtaatacaactttttagtatccagaagataaccagtgctctaccaataaagatcttttgatacaaagggttttaacttctgccagttcttactcatttttttcaggttttttatacatttcttaaacaacacatacattatgtaaaatataagaattaatgtacattctcaaggccagattcagtgacaaaatgcactacccgaatctagtaacacatttactccttgctgcatataagtggcgtgtaagaaatacagggtatattgttttgtgatccatgcagtaaatgttcacaaatatcaggcaaacaactagacgntcttcagctactaaaattaactgtcccagtcacaaa

SEQ ID NO: 561 - DNA, 683 bp, Homo sapien
gtctatttttaaaaagaaagaaaaaaaccacttttttatagtccctagctttgccatatgcccgccttaagtggaaggaaagttaatcacttaactatgttttataaaaagaaaaaagggcttggaatgctattactgttcacacaaagtatgattctgtttgaataaggcaaatgctcctttttttaaaaaaagacattactgtaatatcaaaaaccgtggcagtttgtatacaactctgggcttgattttttttaaaaaaacagaatgaattgatgtcttattttataaatgttctatatttattaggagaaaactttatattgccttttttatcaatcatgtaacaggcttatagctttccaacagagctgcttgccaaacaattttttttgtttattaaacagtgctgaaacaaacaggatcagcatttacttaagatgttaagaatgaggacttttaatcagccgaaccaagatattgttacctgtatgcattcccaaagtctagatgctcagtatgttcagtcatatctttcagaatcagtgaaccgattaccctttttttggtattcactctacatctgccaacctagttcaccttggttttgtgtctgctgtagaagggaaccataacttggttaaaccgtagggattatcattgtatacatgctgtgaacatgt

SEQ ID NO: 562 - DNA, 420 bp, Homo sapien
gcactttttttccagtaaggattcatctcttgctctcctatatggtcattatattttatattttacatatttataaacatgacatatgtatttatgttccacaaagggctttgaatagaatttacacatagagttccctgggttgatgtgtttatcaaaatggaagataaagtgaattaattacttaaatatttaacactattgaatagaaataatttccccaatattgcttcatgatttagacagtctattaaatgtttaagcaaggcactagactaagtttattaagacaaattttggaatatgtgcagaaatatgacctggctaatagtacagagtcaaagctggttgaatggtgttatatagtggattcagattgatgtggcagtggtggttacactaggggcactaaggttatcc

SEQ ID NO: 563 - DNA, 482 bp, Homo sapien
ctccaccttactaccagacaaccttagccaaaccatttacccaaataaagtataggcgatagaaattgaaacctggcgcaatagatatagtaccgcaagggaaagatgaaaaattataaccaagcataatatagcaaggactaacccctataccttctgcataatgaattaactagaaataactttgcaaggagagccaaagctaagacccccgaaaccagacgagctacctaagaacagctaaaagagcacacccgtctatgtagcaaaatagtgggaagatttataggtagaggcgacaaacctaccgggcctggtgatagctggttgtccaagatagaatcttagttcaactttaactttgcccacagaaccctctaaatccccttgtaaatttaactgttagtccaaagaggaacagctctttggacactaggaaaaaaccttgtagagagagtaaaaaatttaacacccatagtagg

SEQ ID NO: 564 - DNA, 302 bp, Homo sapien
ctggaagtgaaggtactaatatacaaatggctcttgtttctgaatatgtgatataatttgtgaatctttggaaactgaattttttctatggagtgcaaatatagaagggttattttacaatgtttgttgtgaaaagaattcactttgtaaacaactattaaggctggaagtttagtgaaggtgcatagttttgaaagctacacaggtgaaaaatcaaacttattgtttgtaattttgctgttacatgttaagttactttgacagcaattttctaatgataatgtgatttatgatttaaaagg

SEQ ID NO: 565 - DNA, 554 bp, Homo sapien
  misc_feature (1)...(554): n = A,T,C or G
ccanngtgacatcatggcaatacagcaagaattctgnnatttatttagaagcctcaaggagaaggatcctggagcccctgaatgagagtttcttctccatgcctctccccagtcaaaatacatggaaatattcatagaagcattgtacccagcatgataaggaaggatggagaatggttccttatatctctgttcacaagacatcaacactcttaagtaactgtatgaaataaattctctgctgaaagcaaataaaccatctgaaaggtcttctggttacttacacagatttcctagagaatctgaaatcagcctaacagggaagattaatttttaaatgaatccaagttaatgaaagcaaagaactcttatacagaaatacattttcctattataaagcaggactaccttccctaatttctgatagacctaggacaatttgaatgggcattgaaattcttttggttgaattacgcaaacaagcaaaggaaaagtctcaattattattggaaaatttggggagagattattatctcttgatctcctagtnnatt

SEQ ID NO: 566 - DNA, 631 bp, Homo sapien
  misc_feature (1)...(631): n = A,T,C or G
ncgaagctgtgaanncattcacacggaatctgganggtattactgtaacttcttataatacataatataaaagtttttgaaagatatagacacaattaacccctaaacaacacactatctgattctcaaaagcaatggctatttaacaagatgtaaaaggacaataacatatcaaagaactttcacacacctaaagatagcatttagcagcaagttagtcagacaaaacaaacataaatatcttcacatttcctatgtttgtttttaactttacttcataaagccactgataattgaggtttctttcaagtataagatttctaaaattaaaaactgtttttgacatatttttataaagaaataaaaagcaaaacgcaatccaactatttatatgagtccctcttctccaacagctttagatgtttttctgagtactttttacacagaatatttttattaaaatcagttctaattcatttatgcagattaggggaaaatgattcataataaattaactttaaaattaccttctatctgcttctacctctatccccccatcaccaccaaatctgttgctacagtgaactgtagccaatgtctgtttgagggggcccaaagcatctggtaatct

SEQ ID NO: 567 - DNA, 510 bp, Homo sapien
  misc_feature (1)...(510): n = A,T,C or G
cctatnatagcttctctagctatcatactccaatcagcnaaaaatgagaaaatgttgagaaatagaagataattcctcatttaaggncaccttctanaatttgtgcttaanantctgttttcttctcatgggccagcacttcggcaactgggaaaaattangngtacagggatctaggnaatactgtttatttgagcaataatatattgngctaacgttcaggcatcctattactgagaaataagggaaaatgagtgtaaagtacaactaagagtctcggctacagggaaaaataccatcagttaaatatccatagtcctagagcatttatgtaaaactgcaatttgaatcctgcaatacattttggctttttcctcagtgataccatgtgtgggaagttgttctgtcaaggtgggtcggataatttgccctggaaaggacggatagtgactttcctgacatgtaaaacatttgatcctgaagacacaagtcaagaaataggcatggtgg

SEQ ID NO: 568 - DNA, 180 bp, Homo sapien
  misc_feature (1)...(180): n = A,T,C or G
ttaatntgacncacgcttatgcggaggagaatgntttcatgttacttatactaacattagttcttctatagggtgatagattggtccaattgggtgtgaggagttcagttatatgtttgggattttttaggtagtgggtgttgagcttgaacgctttcttaattggtggctgcttttagg

SEQ ID NO: 569 - DNA, 237 bp, Homo sapien
ccaattgatttgatggtaagggagggatcgttgacctcgtctgttatgtaaaggatgcgtagggatgggagggcgatgaggactaggatgatggcgggcaggatagttcagacggtttctatttcctgagcgtctgagatgttagtattagttagttttgttgtgagtgtcaggaaaagggcatacaggactaggaagcagataaggaaaatgactatgagggcgtgatcatgaaag

SEQ ID NO: 570 - DNA, 352 bp, Homo sapien
ctgtctctccatttagagccccagttggtcctgacctcttacaaatttggtgttttcactttgatgtttatgaaccgattgcattaaaaatgcaggataatgattcagggttagagaaactattatttatacaaatgtggttaacacctcatcattttaaattggctgtgctaataatgctcattgtgctcttcagggttatgtgtgtgtgtgtgtgtgtgttttgcctgaatctgcaacctacatttgctctggcagtatgttgagtatatgctagaatagaatggacctaggcaactctaaggtcctacaactaaatacacttacttaggaaacctcctaaataagtagg

SEQ ID NO: 571 - DNA, 402 bp, Homo sapien
ctgattttaacaataactactgtgttcctggcaatagtgtgttctgattagaaatgaccaatattatactaagaaaagatacgactttattttctggtagatagaaataaatagctatatccatgtactgtagtttttcttcaacatcaatgttcattgtaatgttactgatcatgcattgttgaggtggtctgaatgttctgacattaacagttttccatgaaaacgttttattgtgtttttaatttatttattaagatggattctcagatatttatatttttattttatttgtttctaccttgaggtcttttgacatgtggaaagtgaatttgaatgaaaaatttaagcattgtttgcttattgttccaagacattgtcaataaaagcatttaagttgaa

SEQ ID NO: 572 - DNA, 70 bp, Homo sapien
  misc_feature (1)...(70): n = A,T,C or G
tggatccgagctcggtaccaagcttggcgtaatcatggtcatagctgtttcctgtgntcgttttacaacg

SEQ ID NO: 573 - DNA, 423 bp, Homo sapien
ccaatggtttcttagtgaaagagtacactagctctgaatgcaatgccctcagaaagatatcattcatagagacatacaaagcacatggcaacatgacattggaatacacgattctgagcatcttcattcatgaccaacctggctatagatttcagatgtcctcttggctcgaaggatatctgggatatccatgctcacttgcattcctttccctttaatttcattttctaagtccttcttgtattgtttctaaaagaacagaaaataatcttggagctttgcttaagctttaatagcgatgttgaaatttacatgtttgaatctcaaagccacccatgtggaaagaaaacttatgctctttccagctatgattcacggcatttattttaaactttgtatcttgctgctgtcttacctggctgg

SEQ ID NO: 574 - DNA, 129 bp, Homo sapien
ctgttaaaagaacaaacttagcaatatataacagtttgctaacaggatttttgactattcactttgcgagttatttttaaaaatccacttttttactgagtcttactacataccaggcactgtacttgg

SEQ ID NO: 575 - DNA, 684 bp, Homo sapien
  misc_feature (1)...(684): n = A,T,C or G
ccagatntgacttttcaaaactactcacattgtgaaaaangcaggaacaaatctagtttcaagttcagcatgccgttccctgtttaattcataaaacacaactggcagaagtattacttgaagcaaaacaaaagtaacgtgggaacttgcttatttgctaagccacaatgtatttttccaggaatagcataaatttgccatctttcttgtgtctatggaaaaggggtttagaattgtttcactaaaaattaaatttctatattgtcaaacatgattgtatactcaaattttaaaatgtgaagggaacacttactaagcatttcctgggtatgccactatattaagtcctagtaatatgatatagtttatttcaattttttttcaactcatacttcctttaaaatagcactgaccaaaagaaagttaacatgagcttcatgtacaatttttaatctttttgcagaaaaataaactgagaaaggctaaaattgttttatttaagccactataccaagacatattgatttcaccaatataaaaattgagatagtttacattttttggtacatctttaaaatctggtatgtatttttatactgacagcacatctcaatttggacaagctacatttccagggctcaatagtcaccatgaatctcaattgtaatcaaagaggttggcctg

SEQ ID NO: 576 - DNA, 134 bp, Homo sapien
ccttatttctcttgtcctttcgtacagggaggaatttgaagtagatagaaaccgacctggattactccggtctgaactcagatcacgtaggactttaatcgttgaacaaacgaacctttaatagcggctgcacc

SEQ ID NO: 577 - DNA, 133 bp, Homo sapien
  misc_feature (1)...(133): n = A,T,C or G
ctgtctctccattnagaagccccantnggtcctnacctcttacaaatttggtgttttcactttgatgtttatgaaccgattgcattaaaaatgcaggataatgattcagggttaganaaactattatttatac

SEQ ID NO: 578 - DNA, 200 bp, Homo sapien
cctcaaatctatcttcaaaggtgacccagcaatcagtgtcaatgcctttactgtagttaacctggtaatttcattctttagtctctccaagaaaatctgaagtgtattaggcaagtcagaacccaaattgtctccaaggttgcaaataatttgtcccatacaggaaatagccctttccttgacttcctgatcaatgtcag

SEQ ID NO: 579 - DNA, 402 bp, Homo sapien; identical to SEQ ID NO: 571

SEQ ID NO: 580 - DNA, 245 bp, Homo sapien
  misc_feature (1)...(245): n = A,T,C or G
ccaattgatttgatggtaagggagggatcgttgacctcgtctgttatgtaaaggatgcgtagggatgggagggcgatgangactaagatgatggcgggcaggatagttcagacngtttctatttcctgagcgtctgagatgttagtattagttagttttgttgtgagtgttaggaaaagggcatacaggactaggaagcagataaagaaaatgactnttagggcgtgatcatnaaangggataaa

SEQ ID NO: 581 - DNA, 294 bp, Homo sapien
tgcagcgcaagtaggtctacaagacgctacttcccctatcatagaagagcttatcacctttcatgatcacgccctcatagtcattttccttatctgcttcctagtcctgtatgcccttttcctaacactcacaacaaaactaactaatactaacatctcagacgctcaggaaatagaaaccgtctgaactatcctgcccgccatcatcctagtcctcatcgccctcccatccctacgcatcctttacataacagacgaggtcaacgatccctcccttaccatcaaatcaattgg

SEQ ID NO: 582 - DNA, 230 bp, Homo sapien
gaggtcgccctcatagtcattttccttatctgcttcctagtcctgtatgcccttttcctaacactcacaacaaaactaactaatactaacatctcagacgctcaggaaatagaaaccgtctgaactatcctgcccgccatcatcctagtcctcatcgccctcccatccctacgcatcctttacataacagacgaggtcaacgatccctcccttaccatcaaatcaattgg

SEQ ID NO: 583 - DNA, 481 bp, Homo sapien
ccaagggtgttctgcctgcctcagcctcccaaagtgctgggattacaggtgtgagccactgtgcctgaccacaggaaaacttatttaaatgagagatttgactcgaaagatcccgtttttttaaggctcttagttcttaaaagcggcacataatagaattagtataatcccaaataaattttcagtagatttttggtgtaacttgagaagatgattctgtcatttttagtgacaatttaaaagacctgaaattgtctacagccatagaaagtgaactactgatagttgtttctgtaaagttttattggaacacaaccacacctatttgttcatctgtattgtctttggttactttgtgcagagaccatggcccacaaacctaaaacattcactttctagctctttaagaaataattggcccactgacaccctggtcttaaggtctagaccaattatttctcaagagtattagctgaatcag

SEQ ID NO: 584 - DNA, 306 bp, Homo sapien
ccaattaagagctaaatttacaaaataatctctatcaggaggctttaaggtttaatgtctctaaagtccctatggatataagaggcttgaatgtactgaattcaaatttggtttttaaatgttataatagtttaggcccgagagccacatatttctgtctaagaatagaaagcatagctagctgcccacacagaatattcatatagaggtggggggcaagaacaaaatttattcatttgatacatagaaatgggactacttagaatagactcataatagaaagcatcatctggtttctcatctcag

SEQ ID NO: 585 - DNA, 308 bp, Homo sapien
ccagaatggtacagagtggagggtgttctgctaatgacttcagagaagtatttaagaaaaacatagaaaaacgtgtgcggagtttgccagaaatagatggcttgagcaaagagacggtgttgagctcatggatagccaaatatgatgccatttacagaggtgaagaggacttgtgcaaacagccaaatagaatggccctaagtgcagtgtctgaacttattctgagcaaggaacaactctatgaaatgtttcagcagattctgggtattaaaaaactagaacaccagctcctttataatgcatgtcag

SEQ ID NO: 586 - DNA, 416 bp, Homo sapien
  misc_feature (1)...(416): n = A,T,C or G
cctgtctttgaatggatgaaataggttaataaaaaacatcactgtttaaaaactagaacactgaaaaattctaggaaagcttattttcccttatatttttatggnactttcaacacttnacaacactatttnaattaanntttnttctagagtttatannatatcagtacattcttttctgtggatgcaataatatagaatcttattncaaatcttactggcaggntctnttaaattcttcaacggntgncatagtgattaaccaaaattagttatgatttctgcctatctgtgtgagaacttacaggggaaattgttctaaacctgaggaacatgaagtaactgtactgcacactccaaatgatgacagtcattttatatcaccttcaattacccaacagcttttaatagtctgg

SEQ ID NO: 587 - DNA, 382 bp, Homo sapien
cctactatgggtgttaaattttttactctctctacaaggttttttcctagtgtccaaagagctgttcctctttggactaacagttaaatttacaaggggatttagagggttctgtgggcaaatttaaagttgaactaagattctatcttggacaaccagctatcaccaggctcggtaggtttgtcgcctctacctataaatcttcccactattttgctacatagacgggtgtgctcttttagctgttcttaggtagctcgtctggtttcgggggtcttagctttggctctccttgcaaagttatttctagttaattcattatgcagaaggtataggggttagtccttgctatattatgcttggttataatttttcatctttc

SEQ ID NO: 588 - DNA, 307 bp, Homo sapien
cctactcttctccgtccattgtactatctgcccgtggtggggatggcagtaggatcatatttgatgacttccgagaagcatattattggcttcgtcataatactccagaggatgcgaaggtcatgtcctggtgggattatggctatcagattacagctatggcaaaccgaacaattttagtggacaataacacatggactaatacccatatttctcgagtagggcaggcaatggcgtccacagaggaaaaagcctatgagatcatgagggagctcgatgtcagctatgtgctggtcatttttggagg

SEQ ID NO: 589 - DNA, 89 bp, Homo sapien
cctgggtgattgaggatgcaatgagctgtgattgtgccaccacactccagcctgggcaatacagcaagactgtctcaaaaaaaaaaaaa

SEQ ID NO: 590 - DNA, 456 bp, Homo sapien
cctcagttcttgattgtggttgacggggcgtcaccatgaaggagcccatttagtataaagcttccaaccttttctcttaatcgtttctttaatcttttaaaccatcttcaagtgcataggggagtttccgatgccagaggatgaaagcaagtgctctctccaccctctcctcccagagtgaaaacaaatccttttgctgatacttgtttcaaaagcatccattgtaaagcttctcagtgacacaaaatactgagaggtaactttttatcaatcaaaccacataccccaatttaacacctttcaatgctctgaattcaactgacagactaaagggtgtttcctgtaacagtctgaaatattaagtgttttttttgttttgtttttaaatcttatttcagaaaacttcctcttggggtaggaaagtacacatgaagcagcaaagtaacgaagaaaaac

SEQ ID NO: 591 - DNA, 289 bp, Homo sapien
ccaattgatttgatggtaagggagggatcgttgacctcgtctgttatgtaaaggatgcgtagggatgggagggcgatgaggactaggatgatggcgggcaggatagttcagacggtttctatttcctgagcgtctgagatgttagtattagttagttttgttgtgagtgttaggaaaagggcatacaggactaggaagcagataaggaaaatgactatgagggcgtgatcatgaaaggtgataagctcttctatgataggggaagtagcgtcttgtagacctacttgcg

SEQ ID NO: 592 - DNA, 435 bp, Homo sapien
  misc_feature (1)...(435): n = A,T,C or G
cgcgttagatgcgccttttccggcctgtgcgtctgctctggttcctctcaggcagcaaagctggggaaggaagctcaggcaggagcctccccgacaccacagcggcacaagcagcagctaaagcaccgcactttgctctgctaaccttttacttaaatgaggttttgccaaatccacatctggaaccgcatcacacccatttgcaaggatgtttgttctttgatgaaactgcatctctactgcacatganggctttcattgtaggacaagaggagagttcgtttatttttgtaactgttttacatgttccgattanttaatcggnagcttatgtcatttgctatgcctgttgtcttctaatctctccttactaaaacattacttcaaatttnaattgacccttgtttataatttatttaacgggatttgngtgtc

SEQ ID NO: 593 - DNA, 633 bp, Homo sapien
  misc_feature (1)...(633): n = A,T,C or G
ctgtttagtcagataattgtgtccgaattgattangaaaataatagaccagccataaagcagcataaaatattatgaaactattccagaagttcagtaatatctttgggacctgctcatagcccaagttttgtgaatacttttgtagttaaaaaaaatttttactttaccagggcattgcaattcttttccatcagtgaatttcattctacagacttttcagagcatctcataatcagtcaacaaatctatttcaaatgtgtttgttactaagcaacggttgctaagagcttctgtaattaagatgaaagttccaaggtaacaatgcccaaacacagcaccattttcaccattttctgataatgcaggagtaggatggctaaaagtgaaagaagaatctactctatggaaagcatggcacctgaaatttctgaagatattggctgtcctctagcttatatgagagagagtgtttgtgctttactaatcaaccagtcatttttttcttgtgtggctgaaatgtacattccagacatgaacaggtagagtatgtgttgggggcaggtttatactgcatgggtgtgctgagacagggccacgtggtgatgtaaatgatgctgnctgacacgtgcag

SEQ ID NO: 594 - DNA, 501 bp, Homo sapien
  misc_feature (1)...(501): n = A,T,C or G
cctttacaagatgctggtaccttgatcttggacngggcaggctccaagatggaaagaaagtgagcatctgctttttagggattatccagtctatactactctgttctagccacacaaaacaggttaagacagaaattggtaccaagagtggggtgttactacagcaaatacctgaaaatgtagaagaggctttgaaatgtggtaattggaagaagctggtagaatttggaggagtaggctagaaaatgtctgtattttcatgaatggagcattaagaataattccggtgaggccatagggaaagtctaaaacttttcagaaattatgtaagcgattgtgattagtaggttggtagaaatatagacagtaaaagcaattctgatgtggtttcagaggaaaatgaaaaatattagaaactgaaggaaggggcatccttgctataaactggcaaagaacttggctgaaatgtctccatgtccaagagatttatggcagaaatgt

SEQ ID NO: 595 - DNA, 383 bp, Homo sapien
ctggtcaccatcatccctttaatcaactcacacctgtttaaagagtgtttctgatttgaccttcatcccttagtttactggcgttaaaaaaagtctcagcaattttcattatttctcgtgggtctcattatcaaacctttacttatttcggcatatttcctctgggcttcttctagtttctgccttacaagcaatgctgttctgtaaatttattgaaacctctggaacatttcacctttagagatggaggatggaaggattggtaccagaagagggctaagatacgttttctgtcttgagctgaaagcacagtctactctccttcgttttgtcgatgagaaagttgaggccagaggggaggtgacatgtttagagtcacccag

SEQ ID NO: 596 - DNA, 266 bp, Homo sapien
ccatggctaggtttatagatagttgggtggttggggtaaatgagtgaggcaggagtccgaggaggttagttgtggcaataaaaatgattaaggatactagtataagagatcaggttcgtcctttagtgttgtgtatggctatcatttgttttgaggttagtttgattagtcattgttgggtggtaattagtcggttgttgatgagatatttggaggtggggatcaatagagggggaaatagaatgatcagtactgcggcgggtagg

SEQ ID NO: 597 - DNA, 383 bp, Homo sapien
  misc_feature (1)...(383): n = A,T,C or G
ctggtcaccatcatccctttaatcaactcacaccngtttaaagagtgtttctgatttgaccttcatcccttagtttactggcgttaaaaaaagtctcagcaattttcattatttctcgtgggtctcattatcaaacctttacttatttcggcatatttcctctgggcttcttctagtttctgccttacaagcaatgctgttctgtaaatttattgaaacctctggaacatttcacctttagagatggaggatggaaggattggtaccagaagagggctaagatacgttttctgtcttgagctgaaagcacagtctactctccttcgttttgtcgatgagaaagttgaggccagaggggaggtgacatgtttagagtcacccag

SEQ ID NO: 598 - DNA, 266 bp, Homo sapien
ccatggctaggtttatagatagttgggtggttggtgtaaatgagtgaggcaggagtccgaggaggttagttgtggcaataaaaatgattaaggatactagtataagagatcaggttcgtcctttagtgttgtgtatggctatcatttgttttgaggttagtttgattagtcattgttgggtggtaattagtcggttgttgatgagatatttggaggtggggatcaatagagggggaaatagaatgatcagtactgcggcgggtagg

SEQ ID NO: 599 - DNA, 294 bp, Homo sapien
  misc_feature (1)...(294): n = A,T,C or G
ccaattgatttgatggtaagggagggatcgttgaccacgtctgttatgtaaaggatgcgtagggatgggagggcgatgaggactaggatgatggcgggcaggatagttcagacggtttctatttcctgagcgtctgagatgttagtattagttagttttgttgtgagtgttaggaaaagggcatacaggactaggaagcanataaggaaaatgactatgagggcgtgatcatgaaaggtgataagctcttctatgataggggaagtagcgtcttgtagacctacttgcgctgca

SEQ ID NO: 600 - DNA, 213 bp, Homo sapien
agatattgggctgttaattgtcagttcagtgttttaatctgacgcaggcttatgcggaggagaatgttttcatgttacttatactaacattagttcttctatagggtgatagattggtccaattgggtgtgaggagttcagttatatgtttgggattttttaggtagtgggtgttgagcttgaacgctttcttaattggtggctgcctttagg

SEQ ID NO: 601 - DNA, 471 bp, Homo sapien
  misc_feature (1)...(471): n = A,T,C or G
ncctactatgggtgttaaattttttactctctctacaaggttttttcctagtgtccaaagagctgttcctctttggactaacagttaaatttacaaggggatttagagggttctgtgggcaaatttaaagttgaactaagattctatcttggacaaccagctatcaccaggctcggtaggtttgtcgcctctacctataaatcttcccactattttgctacatagacgggtgtgctcttttagctgttcttaggtagctcgtctggtttcgggggtcttagctttggctctccttgcaaagttatttctagttaattcattatgcagaaggtataggggttagtccttgctatattatgcttggttataatttttcatctttcccttgcggtactatatctattgcgccaggtttcaatttctatcgcctatactttatttgggtaaatggtttggctaaggttgtctggt

SEQ ID NO: 602 - DNA, 482 bp, Homo sapien
  misc_feature (1)...(482): n = A,T,C or G
tgagcatacagcaataaaaataacataatttntatgtgtacaatatttatggaatacgttactggaacagataaataatttagttaataacatgacaaagaacagaaattgtatacactatacagcatagtaatagaataatgaatgattaaagttattaatattaggtagaaaatgaagggtatctttgagagcagaactcaaggaagcaagcaatttgccttatgaggaaagagttacctgtggataaaggagaaactgaaaaatttacaagtcaagactttttgagcaaaaacaaaaatatgactatgagtcaccaattcagtacagtgaaaaaaaagttgaagagatatcttggaagtaaaccatgttgtggaagagcagggttttgataatcatgggattattctgaatgaattttaaatgcgataggaatatatgagataatttcaccagagaataatatgatcatgtttgcattt

SEQ ID NO: 603 - DNA, 372 bp, Homo sapien
gttccaaccttcatttctgaaactgttctagagcactttgtctttctcgtagttcataacttaccccttcagtctagaattagaattacattatctgttttactactttactagactgtaagctcctagaagataaggactagggagttcatctctgtattccaccagaaggtacagtgactcataactagagtctttagatgaaacttactgagttgaataacttaatatatttctgttttcattcccaagggaggccatgtctggagatagaccttgaatttaataaattttaggcactataccatttcagtggagaaaattgttgggaaatttggggggatggatatataagggggaggaagtcactgg

SEQ ID NO: 604 - DNA, 468 bp, Homo sapien
  misc_feature (1)...(468): n = A,T,C or G
gcngttttgagtgagtttcttaatcctgagttctggnttgattgcactgtggtctgagagatagtttgttataatttctgttcttttacacttactgaggagagctttacttccaagtatgtggtcgattttggaataggtgtggtgtcgtgctgaaaagaatgtatattctgttgatttggggtggagagttctgtanatgtctattaggtccgcttggtgcagagttgagttcaattcctggatagccttgttaactttctgtctcgttgatctgtctaatgttgacagtggggtggtaaagtctcccattattattgtgtgggagtctaagtctctttgtaggtcactaaggacttgctttatgaatctgggtgctcctgcattgggtgcacatatatttaggacagcnagctcttcttgttgaattgatccctttaccattatgtaatggccttgnctcttttg

SEQ ID NO: 605 - DNA, 288 bp, Homo sapien
ccaattgatttgatggtaagggagggatcgttgacctcgtctgttatgtaaaggatgcgtagggatgggagggcgatgaggactaggatgatggcgggcaggatagttcagacggtttctatttcctgagcgtctgagatgttagtattagttagttttgttgtgagtgttaggaaaagggcatacaggactaggaagcagataaggaaaatgactatgagggcgtgatcatgaaaggtgataagctcttctatgataggggaagtagcgtcttgtagacctacttgc

SEQ ID NO: 606 - DNA, 572 bp, Homo sapien
  misc_feature (1)...(572): n = A,T,C or G
gaatnaaatgaatgaaatagaaaatataattgagagcttcaacaacagactataccaaatggaggaaaaaatttctgaacttgaagatagatcttttgaaataacacaagcagtggcaaaaatgaattaaaaagaataaggaaagcctaaaggatttatgagatatcattaagcaagcaaatattcatactatgggcattccagatggaaaaaagaagggtaaaggtgaggaaatcatatttaatgaaataatagcagaaaatttccggagtcttgggagagagatgagcatttaggtccagggagctcaaagaaccccaaacagattcaacccaaacaggtcctctctggagcccaacatagtcaaattgtaataagtaaaagacaaagaattccaanaagcattcaagagaaaagagtcaagtcataaataagggaatctccattaggctaacagcagatatctcagcagaaagcttacangccangagagaatgggatgatatattcaaagtacttgaaagcaggggtnggggaaaccctgctagctaaaaatattatacccttgcaaa

SEQ ID NO: 607 - DNA, 178 bp, Homo sapien
  misc_feature (1)...(178): n = A,T,C or G
ctcggggtaatctcccagcaagaggtcaggtcctggntgtgcgtcccagggtgtcagtgaaattggctgctcccctgacccagggcaccttcatgcgtcttcacagcaggactactgtgaccaaggccagacctttcatctttcaaaagactttgactaaaaatgctttaaaaaagca

SEQ ID NO: 608 - DNA, 416 bp, Homo sapien
cctgtctttgaatggatgaaataggttaataaagaacatcactgtttaaaaactagaacactgaaaaattctaggaaagcttattttcccttatatttttatggtactttcaacacttaataacactatttcaattaagttttctcctagagtttatagtatatcagtacattcctttctgtggatgcaataatatagaatcttattccaaatcttactggcaggttctcttaaattcttcaacggctgtcatagtgattaaccaaaattagttatgatttctgcctatctgtgtgagaacttacaggggaaattgttctaaacctgaggaacatgaagtaactgtactgcacactccaaatgatgacagtcattttatatcaccttcaattacccaacagcttttaatagtctgg

SEQ ID NO: 609 - DNA, 648 bp, Homo sapien
ctgatctctcagcagaaactcttcaaaccagaagagagtgggggccaatattcaacattcttaaagaaaataattttcaacccagaatttcatatccagccaaactaaccttcacaagtgaaggagaaataaaatcctttacagacaagcaaatgctgagagattttatcaccaccaggcctaccctaaaagagttcctgaaggaagcactaaacatggaaaggaacaaccagtaccatcgaggctaggaagaaaccgcatcaactaaggagcaaaataaccagctaacatcataatgacaggatcagattcacacataacgatattaactttaaatgtaaatggactaaatgctccaattaaaagacacagactggcaaattggataaagagtcaagacccatcagggtgctgtattcaggaaacccatctcaccgtgcagagacacacataggctcaaaataaagggctggaggaagatctaccaagcaaatggaaaacaaaaaaaggcaggggttgcaatcctagtctctgataaaacagactttaaaccaacaaagatcagaagagacaaagaaggccattacataatggtaaagggatcaattcaacaagaagagctaactatcctaaatatatattgcaccc

SEQ ID NO: 610 - DNA, 310 bp, Homo sapien
ccagctcttctctgtcacattcctatttctgacttctgcctggctttcagtttctgccccaccttggctttttcccagcttgaacctaatagaactccagagtttggggggaggcccagccctttgttttctgctcttgaagcatattcacacataaaaagttgtattctcttacacaaactgttttgaggctcttaccgtagtcgaaggtatcttagatcttccttagtgatctcattaagaatatccgaaagtgtataaccctcttcaacaatctgaaacaaagatcagatccttaagagctgagcag

SEQ ID NO: 611 - DNA, 254 bp, Homo sapien
  misc_feature (1)...(254): n = A,T,C or G
ctgtttttacatctaaagcaatagactagaactgaattntcttctacatagtaaaatcacaattgtggaattacaggaattctggtgatattaaggtgaaacaacaaaacacaaaaggccctattttaacagttgatgtgacagtaagttttaatagaacctgtaacttcattttggaaatgcttctccaccaaataaggcctttttcccctatttaaggagccagatggattgaaagatgtggaaataggcag

SEQ ID NO: 612 - DNA, 225 bp, Homo sapien
  misc_feature (1)...(225): n = A,T,C or G
ctgactatatcatgtcaccatcatagccaatacaacattnttgccatacttcctaaaaaccttttcgcatacactgatcatgctacttatcagcactttctaacatcctgaccaaacagacacccacacctcttatagagtacactgtgagagaataacatggacttgatatggcatcacacttgttttaaagcaaaaaaaaaagaaaaagaaaagaaaaaaaaa

SEQ ID NO: 613 - DNA, 471 bp, Homo sapien
  misc_feature (1)...(471): n = A,T,C or G
ccatcagacttcttgggtgcctggctatattcaatgtgaagtaaaaaatatcccaagtcttacaccaaaatagaggctctgacttagaagtatgcttttagctttctttttaaataagacattctggaagaaaaaaaaagaaaaaggaaagaaaatcaagtttgaaacacagttaacacttattttggcaagaaagcaaccaaaatctaaaaagcataaactatgngtccaaatgnaaaaggnattacagaacaaactgcaagaggggaaaattaaagccncactgaacgaaaaaatacagtatgtctaacattttggaattgnaatttaaaccctaagggcaaaagctgaaaaatcatgcttanacctnggncgngaccacnctaagggcgaattccancacactggcggncgttactagtggatccnanctcggtaccaagcttggcgtaatcctnggcatagctgttt

SEQ ID NO: 614 - DNA, 421 bp, Homo sapien
gttattttttagaatggctctcccatcttgagtatgtgtgatgtttcctcatgtatgaatgaagcatatacatctttgtcagaagtatcccagaagcaattctgtactctcctcattatgttctattgggtgggccatggtttttgatttgtctcattactgatgatggttacttttattatttgataaaggttgtatataacttatctattatggcataatacattagctaaaaccttggcggtgtaaaacagcagatacttacgtttctcataggaatggctctattgagtacctctgtctcaaggcttctcaagagtttgtagctaccttgttggctggggttgcggtctgacctaaaggcttagttagggggtggtagaaatcttccatatgttctttgctacgtggacctcacagg

SEQ ID NO: 615 - DNA, 242 bp, Homo sapien
cctcctatttattctagccacctctagcctagccgtttactcaatcctctgatcaggatgagcatcaaactcaaactacgccctgatcggcgcactgcgagcagtagcccaaacaatctcatatgaagtcaccctagccatcattctactatcaacattactaataagtggctcctttaacctctccacccttatcacaacacaagaacacctctgattactcctgccatcatgacccttgg

SEQ ID NO: 616 - DNA, 392 bp, Homo sapien
  misc_feature (1)...(392): n = A,T,C or G
cctaatttgtagattgtgaaagcagcttttagtttaacttatttacagaccccttataattaccatgtttttttttttnttcctaaatctnttggttcagcttgngaatnttacgtgcccgtaaagtngggatgttgaatnggcccttntttgttctggcagngagtcaagngtccancattttttcataagngttttttaaaatngttctccancattttatggctcctccctcccatgtcctcaaacccagcaaaagcgtanaggcanaattanaggacccncccgggcggccgntaagggcnaattccagcncactggcggccgttactagnggatccnagctcggnnccaagctnggcgtaatcatggncatagctgtttcctgtgan

SEQ ID NO: 617 - DNA, 215 bp, Homo sapien
cctactatgggtgttaaattttttactctctctacaaggttttttcctagtgtccaaagagctgttcctctttggactaccagttaaatttacaaggggatttagagggttctgtgggcaaatttaaagttgaactaagattctatcttggacaaccagctatcaccaggctcggtaggtttgtcgcctctacctataaatcttcccactatttt

SEQ ID NO: 618 - DNA, 433 bp, Homo sapien
  misc_feature (1)...(433): n = A,T,C or G
cttttgtntgcctgttttgtggactggctggctctgttagaactctgtccaaaaagtgcatggaatataacttgtaaagcttcccacaattgacaatatatatgcatgtgtttaaaccaaatccagaaagcttaaacaatagagctgcataatagtatttattaaagaatcacaactgtaaacatgagaataacttaaggattctagtttagttttttgtaattgcaaattatatttttgctgctgatatattagaataatttttaaatgtcatcttgaaatagaaatatgtattttaagcactcacgcaaaggtaaatgaacacgttttaaatgtgtgtgttgctaattttttccataagaattgtaaacattgaactgaacaaattacccataatggatttggttaatgacttatgagcaagctggtttgg

SEQ ID NO: 619 - DNA, 259 bp, Homo sapien
ctgcagtgtccctttttatatcatgctagtgttgagacatacttgactaacttgggaacagttcgatatattgacaaccgtcaacttaagaaaatcaacagcttttggccccagcgtccaagtgaacttttcatggagtgcagaatctcaaatggacaaaatactttgtctttttaaatactgaaaatttaattattagtactatgactgaaagattcttcatggctaaaaagctctgcatcaaactcaattcaggagg

SEQ ID NO: 620 - DNA, 393 bp, Homo sapien
ccaccaaagccacacggagattctgtcaggcgctgagacaccacagccttttcaatcttagggaaagaaatcaagtcatataaattaatatcaacaggtaaggtcattgagcaattgtctttcaactgtctaagactttatcacttaagatcataaacacagaagcaggtcataaaaatagcttttcttaaggtttaggagaatttgtaggggcacttacttgataatctgaattttctagtcagaagtttaaataccaccttttaaaaacataaaatttaatttgtaacaagttattaacaaagcagtattgtcgaaagttttaagctttctcccaataatttaattacattaattaaatttttaccattctaatggttacaaagtaaccag

SEQ ID NO: 621 - DNA, 563 bp, Homo sapien
ctgacaatgataaaattatctctatatgggcaaacgcgtgctctttgtcgaagaagaaagcttcagcttcatgttccaggtgagttaattaggcaatgtatgaatgctaatatctctttcacatattttgcttaagatctgtcttaggactctcgtctggcccatatggttttccaagggcagaagggcctctttttgatgagaggcagttttcagtaactcttaaagtgataacagcaaaggagaggagagagaagagtaagacaaatcgaaacattcttcaattgcttcttggccttttggctaagctcaagctcaaaacaggtcttcaaggagaaaatacatcacaaagaaaaggatgttttatttcttaccttgtcctagaaaaatttccataaactctattggcttaattctgtaaacttgaccaatatcagagtgcttcctaccaaggagggtagctgatgagcgtgaccatggtacatcctagaagaatgtgtgatgaagaagctttcaccgtgtaaaagagttgaaaattattcaaggagacattatggtcttgg

SEQ ID NO: 622 - DNA, 505 bp, Homo sapien
  misc_feature (1)...(505): n = A,T,C or G
tcttaagtgtgtttaatagataaagtaaactttcctagtcaagggttagatttttattatctcttgtgttccgactttctacttttcaactttgaacttcaaaaaaacattactttgcttatcctttgtactttgatcaggttgtttagaattgtagatcaaaccattctttgatcattttattgtttaaatgnttagttccatttataatttttatagccaactctcggttatttctgtcttttgagattgcaattcagaagctgtatgtcgaagtaatttatgagttgacttttatacttaggcttctttaaatactaatagtcaagaattctagagcatctaataaaaaattaactttcagatcattgggaatctgtcctcatttaaatatgtgtaaatgcatttccacagcaaattgcttcatgccctttgnctataaggaaattattccttgtagctaatacatttttcattttgcagnccaaatcttttttgagaaagg

SEQ ID NO: 623 - DNA, 489 bp, Homo sapien
cctactatgggtgttaaattttttactctctctacaaggttttttcctagtgtccaaagagctgttcctctttggactaacagttaaatttacaaggggatttagagggttctgtgggcaaatttaaagttgaactaagattctatcttggacaaccagctatcaccaggctcggtaggtttgtcgcctctacctataaatcttcccactattttgctacatagacgggtgtgctcttttagctgttcttaggtagctcgtctggtttcgggggtcttagctttggctctccttgcaaagttatttctagttaattcattatgcagaaggtataggggttagtccttgctatattatgcttggttataatttttcatctttcccttgcggtactatatctattgcgccaggtttcaatttctatcgctatactttatttgggtaaatggtttggctaaggttgtctggtagtaaggtggagtgggtttg

SEQ ID NO: 624 - DNA, 233 bp, Homo sapien
gttggggaacagctaaataggttgttgttgatttggttaaaaaatagtagggggatgatgctaataattaggctgtgggtggttgtgttgattcaaattatgtgttttttggagagtcatgtcagtggtagtaatataattgttgggacgattagttttagcattggagtaggtttaggttatgtacgtagtctaggccatatgtgttggagattgagactagtagggctagg

SEQ ID NO: 625 - DNA, 459 bp, Homo sapien
ttcgagaacatttttaataaataatgtgacaaaattacttttctgattattggattttcagtatgcaaaattatggctaaaaataaggggcttcttacatgaacataatgaaaacattaatcacatggattgttcccttagtactgcacgccttttctatggaactttttcaaattatctaaatgaacaagtttggttttggtgaacaccagcctttttttttgtggttcagttttgtttggctttgtcttccactggggtcagacctgatacttatctatctatgaataaatgtacatttttttcttcaaatagcaccaattataaaatcaatgatattcataaaatgacaaaaaaggatcatagaaatctactagtcagagggcatcatttgtcaattgaaagcaagtaatgcctctattagagattttaaggaaatcttgtaggtttcgacattgg

SEQ ID NO: 626 - DNA, 458 bp, Homo sapien
cctgatgattgttttaaacagtagaaagggttcagctaagaactacagtccactctcagccctgtcatgtactataggacaagtcttcattcacaacaaatggatagcaacaccaatctcgtaacactgggaaaactgcatacaatatttagaaggaacactaatacagcagaatctgcacacaacggagtcaaagatctgaggccaaatcctactacactttacgactttgagttggtcacttttctgaaccttagcttctccatcagtgtaaaactgatgtaaaataatataaagctatatgaaagctgatgtgatttacttgtgaaatagtatgtgcaaaaggactttgtaaaatgtaaagcactatgctggttattgtgatatctgagatatttttaaagttgcaattcaattcaacaagcattcatttagagtcatgtgcaaggcactgtgct

SEQ ID NO: 627 - DNA, 393 bp, Homo sapien
  misc_feature (1)...(393): n = A,T,C or G
ccatnngaacgcactcaggaggtggtttgttctggatgcagaaaccagagatctagtttctatccacacagacgggaatgaacagctctctgtgatgcgctactcaatagatggtaccttcctggctgtaggatctcatgacaactttatttacctctatgtagtctctgaaaatggaagaaaatatagcagatatggaaggtgcactggacattccagctacatcacacaccttgactggtccccagacaacaagtatataatgtctaactcgggagactatgaaatattgtactgggacattccaaatggctgcaaactaatcaggaatcgatcggattgtaaggacatttgattggaccgacatatacctgtgggctaggacttccagga

SEQ ID NO: 628 - DNA, 233 bp, Homo sapien
  misc_feature (1)...(233): n = A,T,C or G
ctggatttataaaatagttgaatgacaaaagaagnntgttttgacagtaaaaaaaagacattatggacaaaatatgcaaaatgtgcaaagaaaaaataaatttgcattagaaaggtgggcatttgatctctgagccctgtgccatgtaacattgccatgttctttcactgttgtttgaatgttgtaccccancccttgactctggacttaaggcaagctatgactggctttgg

SEQ ID NO: 629 - DNA, 450 bp, Homo sapien
  misc_feature (1)...(450): n = A,T,C or G
ccnggacaatntaggcaggagaaggaaataaagggtattcaattaggaaaagaggaagtcaaattgtccctgtttgcagatgacatgattgtatatctagaaaaccccattgcctcagcccaaaatctccttaagctgataagcaactccagcaaagtcgcaggatacaaaatcaatggacacaaatcacaaacattcttatacaccaataacagacaaacagaggccaaatcacgagtngaactctattccaattgctttcaagaaaattaaaatacctagggatccaacttacaagggacatgaaggacctcttcaaggagaaactacaaaccactgctcaatgaaataaaagaggatacaaagaaatggaagaacattccatgctcattggtagcttgatggggatggcattgaatctataaattaccttgggcagtatggacctca

SEQ ID NO: 630 - DNA, 486 bp, Homo sapien
cctactatgggtgttaaattttttactctctctacaaggttttttcctagtgtccaaagagctgttcctctttggactaacagttaaatttacaaggggatttagagggttctgtgggcaaatttaaagttgaactaagattctatcttggacaaccagctatcaccaggctcggtaggtttgtcgcctctacctataaatcttcccactattttgctacatagacgggtgtgctcttttagctgttcttaggtagctcgtctggtttcgggggtcttagctttggctctccttgcaaagttatttctagttaattcattatgcagaaggtataggggttagtccttgctatattatgcttggttataatttttcatctttcccttgcggtactatatctattgcgccaggtttcaatttctatcgcctatactttatttgggtaaatggtttggctaaggttgtctggtagtaaggtggagtggg

SEQ ID NO: 631 - DNA, 211 bp, Homo sapien
tttacataaatattatactagcatttaccatctcacttctaggaatactagtatatcgctcacacctcatatcctccctactatgcctagaaggaataatactatcactgttcattatagctactctcataaccctcaacacccactccctcttagccaatattgtgcctattgccatactagtctttgccgcctgcgatgcagcggtagg

SEQ ID NO: 632 - DNA, 293 bp, Homo sapien
  misc_feature (1)...(293): n = A,T,C or G
cagcgcaagtaggtctacaagacgctacttcccctatcatagaagagcttatcacctttcatgatcacgccctcatagtcatttttccttatctgcttcctagtcctgtatgcccttttcctaacactcacaacaaaactaactaatactaacatctcagacgctcaggaaatagaaaccgtctgaactangctgcccgccatcatcctagtcctcatcgccctcccatccctacgcatcctttacataacagacgaggtcnacgatccctcccttaccatcaaatcaattgg

SEQ ID NO: 633 - DNA, 263 bp, Homo sapien
  misc_feature (1)...(263): n = A,T,C or G
nggtctgcagtgtccctttttatatcatgctagtgttgagacatacttgactaacttgggaacagttcgatatattgacaaccgtcaacttaagaaaatcaacagcttttggccccagcgtccaagtgaacttttcatggagtgcagaatctcaaatggacaaaatactttgtctttttaaatactgaaaattnaattattagtactatgactgaaagattcttcatggctaaaaagctctgcatcaaactcaattcaggagg

SEQ ID NO: 634 - DNA, 491 bp, Homo sapien
cctactatgggtgttaaattttttactctctctacaaggttttttcctagtgtccaaagagctgttcctctttggactaacagttaaatttgcaaggggatttagagggttctgtgggcaaatttaaagttgaactaagattctatcttggacaaccagctatcaccaggctcggtaggtttgtcgcctctacctataaatcttcccactattttgctacatagacgggtgtgctcttttagctgttcttaggtagctcgtctggtttcgggggtcttagctttggctctccttgcaaagttatttctagttaattcattatgcagaaggtataggggttagtccttgctatattatgcttggttataatttttcatctttcccttgcggtactatatctattgcgccaggtttcaatttctatcgcctatactttatttgggtaaatggtttggctaaggttgtctggtagtaaggtggagtgggtttgg

SEQ ID NO: 635 - DNA, 270 bp, Homo sapien
ccaattgatttgatggtaagggagggatcgttgacctcgtctgttatgtaaaggatgcgtagggatgggagggcgatgaggactaggatgatggcgggcaggatagttcagacggtttctatttcctgagcgtctgagatgttagtattagttagttttgttgtgagtgttaggaaaagggcatacaggactaggaagcagataaggaaaatgactatgagggcgtgatcatgaaaggtgataagctcttctatgataggggaagtagcg

SEQ ID NO: 636 - DNA, 383 bp, Homo sapien
cctactatgggtgttaaattttttactctctctacaaggttttttcctagtgtccaaagagctgttcctctttggactaacagttaaatttacaaggggatttagagggttctgtgggcaaatttaaagttgaactaagattctatcttggacaaccagctatcaccaggctcggtaggtttgtcgcctctacctataaatcttcccactattttgctacatagacgggtgtgctcttttagctgttcttaggtagctcgtctggtttcgggggtcttagctttggctctccttgcaaagttatttctagttaattcattatgcagaaggtataggggttagtccttgctatattatgcttggttataatttttcatctttcc

SEQ ID NO: 637 - DNA, 537 bp, Homo sapien
  misc_feature (1)...(537): n = A,T,C or G
ttttaatcctggggtatataggcagnactttaaattgcaaagtcttccgggcctattttcctctacatttttgtaattaactctgggggcttacttgttttggcagtactgaaatcaaaggagctggttcttcttttctcccaattattttcatatgaaagcacctacaattagcctgttagtcctattcagatacatcaaatatcagtgaatgctttactattcgcacatttaagcatctttgttttacataaaattagagtatgaaaaccagtgttcaattttttatcttgttgagcttgtaaaatgccagcaatttaaaactaggacttttccccccataagccaaggaggtagaattactaatacaagggttaaagaaggtagattttgttttcaatatttgggtaatattagaaagattcttcccacagggaagaactagcaagtgtcccaattttttccaaacgttggggaggggaaaattcactgtatcatgaaaccctaagggtttgngtgcacttcctgctttttagg

SEQ ID NO: 638 - DNA, 445 bp, Homo sapien
  misc_feature (1)...(445): n = A,T,C or G
ccagcagaacacagnagtgatttggtcccgtttgttccccagtggggtatctatccttgtgcagggcacaagcctacatggtggctctggtcatatcattagaaaatagacagaaatgggctgcacaccagaatgaatgaattgaattgaaagggaggagtgatggtggaaaaaaaaacaagtcaattcatttagactggtagaaccagaaccactgtgtagtacatccaaacggttaaaattccctggaagatgttacataatcctatcatggtgtttatttatggaaatctattttaaaaattttatgtaatactgcacagtctgtttgcatgatgccttgtacgtagtagcaactcagtaaatactttttgaatgaactagtatagtattttaattagctagtcttcgtgtactggtacaaaagaacagtgtcatcttacag

SEQ ID NO: 639 - DNA, 584 bp, Homo sapien
gcttgagtattctatagtgtcacctaaatagcttggcgtaatcatggtcatagctgtttcctgtgtgaaattgttatccgctcacaattccacacaacatacgagccggaagcataaagtgtaaagcctggggtgcctaatgagtgagctaactcacattaattgcgttgcgctcactgcccgctttccagtcgggaaacctgtcgtgccagctgcattaatgaatcggccaacgcgcggggagaggcggtttgcgtattgggcgctcttccgcttcctcgctcactgactcgctgcgctcggtcgttcggctgcggcgagcggtatcagctcactcaaaggcggtaatacggttatccacagaatcaggggataacgcaggaaagaacatgtgagcaaaaggccagcaaaaggccaggaaccgtaaaaaggccgcgttgctggcgtttttccataggctccgcccccctgacgagcatcacaaaaatcgacgctcaagtcaagaggtggcgaaacccgacaggactataaagataccaggcgtttccccctggaagctccctcgtgcgctctcctgttccgac

SEQ ID NO: 640 - DNA, 404 bp, Homo sapien
ccataggaacgcactcaggcaggtggtttgttctggatgcagaaaccagagatctagtttctatccacacagacgggaatgaacagctctctgtgatgcgctactcaatagatggtaccttcctggctgtaggatctcatgacaactttatttacctctatgtagtctctgaaaatggaagaaaatataggagatatggaaggtgcactggacattccagctacatcacacaccttgactggtccccagacaacaagtatataatgtctaactcgggagactatgaaatattgtactgggacattccaaatggctgcaaactaatcaggaatcgatcggattgtaaggacattgattggacgacatatacctgtgtgctaggatttcaagtatttggtgtctgg

SEQ ID NO: 641 - DNA, 138 bp, Homo sapien
  misc_feature (1)...(138): n = A,T,C or G
ctgtgacaggaacattacctgaagtgcagggtggttacctgcacaaagtcccatttccaaaaatttctgtgtaattcaccagaaattttggatggaataattagaaaaaaaaaaagaggttaaaacntgtaactcaaa

SEQ ID NO: 642 - DNA, 381 bp, Homo sapien
  misc_feature (1)...(381): n = A,T,C or G
ctgtaggtggaatttttacccagaaaagataggccctagaagcctcatttcttttctccatggaaaaggacagccctctgctgcagcgttcaacttgtgtgtttactgacagagtgaactacagaaatagcttttcttcctaaaggggattgttctacattttgaagttattttttaataaaattgaattatgttgtgtattgtgcttcctaataggaaatgcattattggactgtttttgtaacatcctgtttattgcaaatagctagtatcgttcaaaaactgtataaaatacttttgtacatattagcaatgtctaatttgtatacacttcagttaaatttccctaaaacttgaaaggggaccttgtanaaattaaaa

SEQ ID NO: 643 - DNA, 403 bp, Homo sapien
ccttcctaaaaaatagtggtgagctggaggctacttccgccttcttagcgtctggtcagagagctgatggatatcccatttggtcccgacaagatgacatagatttgcaaaaagatgatgaggataccagagaggcattggtcaaaaaatttggtgctcagaatgtagctcggaggattgaatttcgaaagaaataattggcaagataatgagaaaagaaaaaagtcatggtaggtgaggtggttaaaaaaaattgtgaccaatgaactttagagagttcttgcattggaactggcacttattttctgaccatcgctgctgttgctctgtgagtcctagatttttgtagccaagcagagttgtagagggggataaaaagaaaagaaattggatgtatttacag

SEQ ID NO: 644 - DNA, 688 bp, Homo sapien
  misc_feature (1)...(688): n = A,T,C or G
cctatttatttgttttggccctggatctttcctaatcacaattatatttctttatttttgcctttgagcagtttcatttatctttgtgggcagggaagattaaatatgaaattcagtccagtcattttgctactggttagctttagtttgaggcaagtaaaaatttttgattaaaattagtttcttaaaattatgcccttgctttaccaaataatcaaattggctaaaaaataagggtatgtaactttgcattttgaagaacaaaccaataatttttcatgagccctactcgatcttctttaaagaagaccttcctaagagacaattagggatgagtttgattaatgggaaatagctctaggttagattattttaaattccatacaccaagtgatttaaccacagtggcagtggcagcttctgaaccgtcaagtatgaacatcacttaaaaattaaaagatgcttaataataaactcttaattttcattaagccaatctgtaattcagaagaaaagcatatgtctgccatgggactattgcagtgcgtctccatcagtgttaacacaggagagatatgttattttatgtgtatgtcttagtttgggatatgtggtagtaagaacatgtcaagagtgcttttcttcaaacctgncagctcaactgangaaagacaggtacttccattgc

SEQ ID NO: 645 - DNA, 484 bp, Homo sapien
  misc_feature (1)...(484): n = A,T,C or G
ccaaatgtgtctccagcccacacttccaggtggcagagcgagctctctattactggaataatgaatacatcatgagtttaatcagtgacaacgcagcgaagattctgcccatcatgtttccttccttgtaccgcaactcaaagacccattggaacaagacaatacatggcttgatatacaacgccctgaagctcttcatggagatgaaccaaaagctatttgatgactgtacacaacagttcaaagcagagaaactaaaagagaagctaaaaatgaaagaacgggaagaagcatgggttaaaatagaaaatctagccaaagccaatccccaggtactaaaaaagagaataacatgaaaacgcccagggttacttgaatgtttttataagataggaatatatgtcttcaccatgggggggggtctcggatttcactaacgttgtatatgaaaatgggtgcnataaaaagtacttttaaactttgt

SEQ ID NO: 646 - DNA, 447 bp, Homo sapien
  misc_feature (1)...(447): n = A,T,C or G
gggtcgcgttgaacaacttggttcaagatggtgggggcatttttagagcggcaataattgaaaaaaaaggcgaactctgccttggagaggtagatgataagaaataaaaaggtgtttataactattttgtattataaagtgggccttagagataggaagaagaatgatggattccttttggatcaatcagaaaggaaacacgaaagaaaagtcaggaaggtagagagagaaaaagggagggaaggagaaagaatgggaataaaataaggaggtaagagatactatttttgctgagcaaccagtgtgtttcaggatgatacaaagaaaaatatagaatagaaataagtgcaggcttggaatcagctacaaatcctaaagatggggtgtgtgtggatgtgtgtgtgtgtgtgtgnacaccattgtgtgtttgtaaaatgtgtatgtccc

SEQ ID NO: 647 - DNA, 388 bp, Homo sapien
gaaggtgatataaaatgactgtcatcatttggagtgtgcagtacagttacttcatgttcctcaggtttagaacaatttcccctgcaagttctcacacagataggcagaaatcataactaattttggttaatcactatggcagccgttgaagaatttaagagaacctgccagtaagatttggaataagattctatattattgcatccacagaaaagaatgtactgatatactataaactctaggagaaaacttaattgaaatagtgttattaagtgttgaaagtaccataaaaatataagggaaaataagctttcctagaatttttcagtgttctagtttttaaacagtgatgttttttattaacctatttcatccattcaaagacagg

SEQ ID NO: 648 - DNA, 632 bp, Homo sapien
  misc_feature (1)...(632): n = A,T,C or G
cctggctgggcntttgacctgcgnttttaaatnactcacagagggtgggacaggaggaagagtgaaggaaaaggtcaaacctgttttaagggcaacctgcctttgttctgaattggtcttaagaacattaccagctccaggtttaaattgttcagtttcatgcagttccaatagctgatcattgttgagatgaggacaaaatcctttgtcctcactagtttgctttacatttttgaaaagtattatttttgtccaagtgcttatcaactaaaccttgtgttaggtaagaatggaatttattaagtgaatcagtgtgacccttcttgtcataagattatcttaaagctgaagccaaaatatgcttcaaaagaagaggactttattgttcattgtagttcatacattcaaagcatctgaactgtagtttctatagcaagccaattacatccataagtggagaaggaaatagatagatgtcaaagnatgattggtggagggagcaaggttgaagataatctggggttgaaattttctagttntcattccgtacatttttagttagacatcagatttgaaatattaatgttacctcctcaatggggtggtatcagacctgcccgggcggncgnntc

SEQ ID NO: 649 - DNA, 300 bp, Homo sapien
  misc_feature (1)...(300): n = A,T,C or G
nggtgaagatagaanaaatataagcgaaattggataaaatagcactgaaaaaatgaggaaattattggtaaccaatttattttaaaagcccatcaatttaatttctggtggtgcagaagttagaaggtaaagcttgagaagatgagggtgtttacgtagaccagaaccaatttagaagaatacttgaagctagaaggggaagttggttaaaaatcacatcaaaaagctactaaaaggactggtgtaatttaaaaaaaactaaggcagaaggctttggaagagttagaagaatttggaagg

SEQ ID NO: 650 - DNA, 498 bp, Homo sapien
  misc_feature (1)...(498): n = A,T,C or G
ngtnctgntaaacagaagggtacaangcccttctggctttaagcagtcataggaatgtgacagacattcctcttagggagcgcctcctcctagggtttcctcatctgtctcacactgagtggatgtaatgctattttaatcctgctgtggcccccaatactagtacttgtccataccttcttgcatttttagcgtctgctctgtggggttgttaggccctggcactcccaggaactagtgctaaagctgcatctntctctcccctctagggatcgataaagtttcactgcagaaagtctccactgcggtatgctgacatctgccctgaaccttcaccctacagcattacaggctttaatcagattctgctggaaagacacaggctgatccacgtgacctcttctgccttcactgggctggggtgatccttggtgcctttgtttccacaaggccttttcctgccccctgccttgccaaagacatttaatcagcacacag

SEQ ID NO: 651 - DNA, 654 bp, Homo sapien
  misc_feature (1)...(654): n = A,T,C or G
ctgagggtccccaggtttctaaagctctcaggacgagaaagtaggtcccaagataaggagcctaaagggcttttttctttctgtgtattccttcttggcctccaacatgggtacagtcacaagagcatgtaacagagaagaaggactanacctaccattttctggataaagaattggaaagaggatccacaggtaaccaaaaagtaccagggaaatggcagagaaggaaaacctcaggagaccaacctcataagtggtatttattagngcctgggctcaaatccaaattgtacatgaatatgtctggtcctagatagggtaccgaagactttgaaagtgaattttggtatatcattgcccagattccagactggntattgtgtgacacaacatacaggatatatctgaatagtgctcagaagagtttgaaaatgcaaatgatattaaaataaagatgaaaaagagaaagctggtcagaacttgtggacataacccttctggatctgtngcctgattaaaaaatagttgatattctcgaatgaattaaaacaagatttagagactgagcatggtagctnattcttgtaatccaacnctttgggagggcaaggcaanagaattgcttgcggccaggagttttgagaccagcttggg

SEQ ID NO: 652 - DNA, 293 bp, Homo sapien
  misc_feature (1)...(293): n = A,T,C or G
ngtctgttgcactgaggtgactaaggatacattttgaggaagtagctccaagaacatttccattttcactgtgccttcacatacatctaatggaaatgaacagcacccttcatccatccacggaagcgattaagaaaagggtgggatggaaaaattaacccaacaatattagatcaatacgtagtatttaagngtccataatgtgccaggctgaagatgcacgggaaaaccacactagccggtctgtcaagggcttgagaataccataaacaagaaaacagacgaaccaattt

SEQ ID NO: 653 - DNA, 294 bp, Homo sapien
  misc_feature (1)...(294): n = A,T,C or G
ngtccaccactgcagccctacatacagttgaaaaaaaattccattctgttaacatttgttttataagttttcacgcaatacacaaaaaacccctctgcacttcttgtaaagaacaaaaaagatacacaacagttaagcgtaaagatcacaggcaatagcattcaaacatggatgtgggtagagaaaggagtacctggcatgagtacctgcttagtttgactgaatccttgatttttaatttggcttttcatgggccgctcacaacaccaacgctgtgtgaggtatggtagtcag

SEQ ID NO: 654 - DNA, 250 bp, Homo sapien
ctgtccttgaacaagtatcaatgtgtttatgaaaggaagatctaaatcagacaggagttggtctacatagtagtaatccattgttggaatggaacccttgctatagtagtgacaaagtgaaaggaaatttaggaggcataggccatttcaggcagcataagtaatctcctgtcctttggcagaagctcctttagattgggatagattccaaataaagaatctagaaataggagaagatttaattatgagg

SEQ ID NO: 655 - DNA, 494 bp, Homo sapien
ccattataattttataacaccattaccctttaaattctaccgattataagcagcgtaaaagtaactatataaagcaaacatcgcaaaggaactctgcaggagctcttaattcctttatgtagctatcataaaattcactttcctgaagacatttactctcattcacttccaaactccaaacctttttctggtagcaccacttttgtttttaatagaaagatgagttcatatctgtacatctctccaaagctctaaggaatgagaaaaggatcctagtatattgaaattactgatgtttaatacctctgccttttcactaaaagccatttaatatttttaaagtcaaaacttgacatacaggtatttataaggaatctccatgactctgaaggaatgaaattgatgtaggtagctttggctatgtaaagacatagtagaggacaattacttaaagaagagttttcttttgaggatttgtagatttgactaagcag

SEQ ID NO: 656 - DNA, 477 bp, Homo sapien
cgcgttactgtacatattgctagcaggagacaactggaaatactaaacaaatactggaattcacattacagacagacgaaaccaacatggatgccacacataacttcctttgtagtttcacagagggcctatttgtggttgctcaggtggggtcatacattgcttgcagaaatggcctgatcatagctctatgaaacaatgaattcggaatgaaatcttaccatgacacctctctgtaggaaagaaatgttgcttcacgtgtgctaagttgagataataatatttcacatatttatatacagagaatcactctcaaatttaacccaagataagcaataggatttgggggtgacttgtacacatttctaacaacacttttcttttttctagaggtcactctcaaacactgatatatcactatagtttgagtgtagggattcagtaatcaaaggttgttattgcaaaagagccaggcag

SEQ ID NO: 657 - DNA, 576 bp, Homo sapien
  misc_feature (1)...(576): n = A,T,C or G
cctctacctgtanatcactatttttctaaagacaatttggtgttttgaagataaatgtcattagtctatgataatagcatcataggacaattagccattttagacttgaccatattttctctttttagcatatagccatcttgatatttaggtgggagactactccaatggagcaacagtttcattttacatgattggatttagaaatttacaaattttaaactcataagaattctaaataatttgaaaatggaaacatttgacccacagtctagcagcataaatacatttataaaatacttcattgttgatcttaggtcattgatttaaaacagaatttggtgactatgggcaggtggagggggccagtgaggaaggtataaaagagaaatctttatgaattgtgttcagattgattttgtataaacataatatattcatggttgtatctcttatttataatacccaactaacatgaaggtggtccaagggaaggatcaatattttaaataacatatttgcttaaaatatcatacagtggctgcttcataaaaaatcttataaacttttattacc

SEQ ID NO: 658 - DNA, 344 bp, Homo sapien
  misc_feature (1)...(344): n = A,T,C or G
cctgaaaagaaagntgctcttatggactcttgcatgttaagactatgtcttcacatcatggtgcaaatcacatgtacccaatgactccggctttgacacaacaccttaccatcatcatgccatgatggcttccacaaagcattaaacctggtaaccagagattactggtggctccagcgttgttagatgttcatgaaatgtgaccacctctcaatcacctttgagggctaaagagtagcacatcaaaaggactccaaaatcccatacccaactcttaagagatttgtcctggtacttcagaaagaattttcatgagtgttcttaattggctggaaaagcaccag

SEQ ID NO: 659 - DNA, 230 bp, Homo sapien
ctgctttccctgctaaacagttccagagcaaaagcagcaaaaagaaaatatgggagggatatgggcaacgtatactcgaacgtacgcagagaagagagtacggttagctctaatatttctcattgaacttggtggtatgtgccttccctgcatataaggccatagtgcttttttgggagcgctagaatatccatccacttgacagtgaccacaaaataggctgtttccag

SEQ ID NO: 660 - DNA, 80 bp, Homo sapien
ctggtccttgttaaactcgatcaccactttggagagatcgactggaggctcctgggtgttctgaggggcctgggggacag

SEQ ID NO: 661 - DNA, 535 bp, Homo sapien
  misc_feature (1)...(535): n = A,T,C or G
ctgaaccatatctgattaactctttggtctctgttattggaacaaaaccgacgctatgcctgcagccgccagactgcaaccaaaaacacagtttggggtcagaagacattaaaaatcacaataaaataggatgaatgttctaagtcacgcaactgaatcaaggcacctttttttttcaaaagcaaaaagttgtttaacaatattccagaatagtagatacttcaaaaaccagattacagtatatatcattttgctgcacattttagtctattttctgtatacatagtcacacattctttaccctctcccaacttatacatgctttatccccccagtcatgtgctatgtaggtataaaaaaataaagttgtatctaaacaagtgatttaaaaaaaaaaactaacgaatgccncnatnataacnctgaacttgtttccctnttgaaggacattggaaatgttaccgaggttnntttacctnggccgcaaccncnctangggcnaattccagcncactgggggccgttactaggggat

SEQ ID NO: 662 - DNA, 257 bp, Homo sapien
cctgactaaagcacatatcacactccctacacttccatgttttctctcccatgtggaccctctgatgcatatcaagattcaagcgcctgttgtagcccttcccacagtcctcacatttgtatggcttttctacactgtgaactttttcttgcactttagagaatgaattctgtacaatgttcttcccatgctgctcacatttgagaggtgtttctctgctgtggcgtctctgatgggtcagacgagttgaggaccag

SEQ ID NO: 663 - DNA, 516 bp, Homo sapien
  misc_feature (1)...(516): n = A,T,C or G
ccaattataggtattttattttttaaagattagagngttcttgaagctctttctatttctttgtcaatgaactaaacattggcaaatatgtagggtttcccacataagaacattattaacatcaaaatagaaagctggtggtagaaataatgattgggaacacagagtctctactcagcgttctacttctgccataccataactttgtgatctcacgaaatatctctccatgttctcatccctatgtatagttctgtcatttttcaataagagctttttgcttaattatgaagtactagttactataaccattattttgagcttcatgtaaatcaagaacacatggactccacttgcaaaacattgaaaatgtagttagggattgggggcaaaaagcaacattttaaaatgtgtaaagacaatgagtaagcaacaaagtgtccaattttttaggcgaaagttgcatatgtcaggaaaaggcaggattaagtaatagagaatttgaatgataactgg

SEQ ID NO: 664 - DNA, 212 bp, Homo sapien
gtccgaggaggttagttgtggcaataaaaatgattaaggatactagtataagagatcaggttcgtcctttagtgttgtgtatggctatcatttgttttgaggttagtttgattagtcattgttgggtggtaattagtcggttgttgatgagatatttggaggtggggatcaatagagggggaaatagaatgatcagtactgcggcgggtagg

SEQ ID NO: 665 - DNA, 408 bp, Homo sapien
  misc_feature (1)...(408): n = A,T,C or G
atccaggggtncccggtngctgcngggaaacctccagccttgttcttcaaaccactcagctcatgtgttttgcgctgactagtactgaataatacaaccactcttatttaatgttagtattatttatttgacaactcagtgtctaacagcttgatatgcaggtccttgcatcctacatttctttaggaagttacccatttgtaactttaaaaacaggaaaaatatcagttggcaaatgcaatcttttttttttttaagctaaaggggggnnaacngnaannaaaatntttntgangtngggtctataagcacccttgangggatntgttaaaagngncatnaangggggattctcntttngcaaaaaaatntaannatcaatttatananctttatttttnactttnt

SEQ ID NO: 666 - DNA, 635 bp, Homo sapien
  misc_feature (1)...(635): n = A,T,C or G
ctgaagnacaagggtcaggcaaaaataagatcacaatcaccaatgaccagaatcgcctgacacctgaagaaatcgaaaggatggttaatgatgctgagaagtttgctgaggaagacaaaaagctcaaggagcgcattgatactagaaatgagttggaaagctatgcctattctctaaagaatcagattggagataaagaaaagctgggaggtaaaccttcctctgaagataaggagaccatggaaaaagctgtagaagaaaagattgaatggctggaaagccaccaagatgctgacattgaagacttcaaagctaagaagaaggaactggaagaaattgttcaaccaattatcagcaaactctatggaagtgcaggccctcccccaactggtgaagaggatacagcagaaaaagatgagttgtagacactgatctgctagtgctgtaatattgtaaatactggactcaggaacttttgttaggaaaaaattgaaagaacttanctctcgaatgtcattggaatcttcacctcacagtggngttgaaactgctatagcctaagcnggctgtttactgntttncattagcaggtgctcaccatgtctttggggtgggnggggggagaaagaaagaan

SEQ ID NO: 667 - DNA, 388 bp, Homo sapien
gaaggtgatataaaatgactgtcatcatttggagtgtgcagtacagttacttcatgttcctcaggtttagaacaatttcccctgtaagttctcacacagataggcagaaatcataactaattttggttaatcactatggcagccgttgaagaatttaagagaacctgccagtaagatttggaataagattctatattattgcatccacagaaaagaatgtactgatatactataaactctaggagaaaacttaattgaaatagtgttattaagtgttgaaagtaccataaaaatataagggaaaataagctttcctagaatttttcagtgttctagtttttaaacagtgatgttttttattaacctatttcatccattcaaagacagg

SEQ ID NO: 668 - DNA, 498 bp, Homo sapien
  misc_feature (1)...(498): n = A,T,C or G
tgatcttaacaaaattcgtagcagtggaaccttgaaatgcatgtggctagatttatgctaaaatgattctcagttagcattttagtaacacttcaaaggtttttttttgtttgttttctagacttaataaaagcttaggattaattagaagaagcaatctagttaaatttcccatttgtattttattttcttgaatacttttttcatagttattcgtttaaaaagatttaaaaatcattgcactttggtcagaaaaataataaatatatcttatgaatgtttgattcccttccttgctatttttattcagtagatttttgtttggcatcatgttgaagcaccgaaagataaatgatttttaaaaggctatagagtccaaaggaatgttcttttacaccaattcttcctttaaaaatntctgaggaatttgttttcgccttacttttttttcttctgtcacaatgctaagnggtatccgaggttnttaatatgagattt

SEQ ID NO: 669 - DNA, 622 bp, Homo sapien
ccttagccaaagaatgcagtggagccttcccccttcaactgcattgtgaatgaataccaattaacagcataaaaattaatagtcccatatcagatctggaaggggtttctggggctgtctgatgtccctatcctgttgtagtgaacacaatagcagaaaattctttctgggtccatctgctataaagtcttggtaaaacagcattactatgaagaggatgaactcacctaccttcagatggaggaaaagtgaaaaggacttaggctttagtcctccatgacttttcttaagcactacctacctgtaataagctgagtgcaaaaggatgccgaagaaaatctgcacccagaagctgttagaaagcactgcagagaacagggtatgaagaaaataaagagttcttaataaacccttaagattctttgttcaaggtaaccttgccaaaagggcagagtaggtggcaaagagttgcttttaatctagctctacactgcatttgaaaataaaatttgcccattttgaatatattgtttataattaaatgtgctttttacactgcaggtcaatataaaaactggttagtaaatttccagcgagcatttatgttcatttgctcacagca

SEQ ID NO: 670 - DNA, 477 bp, Homo sapien
ttgggccctctagatgcatgctcgagcggccgccagtgtgatggatatctgcagaattcgcccttgccgcccgggcaggtgatggatgaggagcaaaaactttatacggatgatgaagatgatatctacaaggctaataacattgcctatgaagatgtggtcgggggagaagactggaacccagtagaggagaaaatagagagtcaaacccaggaagaggtgagagacagcaaagagaatatagaaaaaaatgaacaaatcaacgatgagatgaaacgctcagggcagcttggcatccaggaagaagatcttcggaaagagagtaaagaccaactctcagatgatgtctccaaagtaattgcctatttgaaaaggttagtaaatgctgcaggaagtgggaggttacagaatgggcaaaatggggaaagggccaccaggctttttgagaaacctcttgattctcagtctatttatcag

SEQ ID NO: 671 - DNA, 127 bp, Homo sapien
gtgtgtgtgtctacttgggcgtgtttaacgtgtgcgtttgtgtctgcgtgtgcatgtgtctgtgtgtgcgcgtgtatttcagtttgggttgccggatcccatatgattgcgtgcctgtgtacctgag

SEQ ID NO: 672 - DNA, 400 bp, Homo sapien
gggtctgcacagctatgttaacagcatccttataccaggagtaggaggaaagacacgactggaaaagcaattcaagctggtcacacagtgtaatgcaaaatatgtggaatgtttcagtgctcagaaagagtgtaacaaagaaaagaacagaaactcttcagttgtgccatctgagcgtgctcgagtgggtcttgcaccattgcctggaatgaaaggaacagattacattaatgcttcttatatcatgggctattataggagcaatgaatttattataactcagcatcctctgccacatactacgaaagatttctggcgaatgatttgggatcataacgcacagatcattgtcatgctgccagacaaccagagcttggcagaagatgagtttgtgtactgg

SEQ ID NO: 673 - DNA, 600 bp, Homo sapien
  misc_feature (1)...(600): n = A,T,C or G
ctggcgttgctcattagtgaatgtatgacagcaggatgtgaggggatgcccaggagtcagtgttagcattgtcatctgagatcactgctattaatatcatccattaatttattagtgagcttcactatatgcagactgggagataaggagaaaatctgtcacattctctctagctaatcagatcagctaccaattaatgagattctgaatgaaatatcaatatgtgtttttctaatttggacctaggacagagctgttgcttgtcatagagaaaaacaataatgcttaaacatagcacattataattaaagcaggtttctcacatacttttcattttatcctttggataattttgtgaggaacgcaggacaccaacttccctttcatagatacaatccccatgctattgatgaaagtgtttttgaatgaagccatacaacaaataactgatcaaagtggcattacaccaaaatttcttagtaggactcctgcatagaatgtttagatagacgtgaaaagtttgttcangaggaccagcaagagagaaactgggttctttgggagggtttcggtgctacatttataccctncatcagagtn

SEQ ID NO: 674 - DNA, 140 bp, Homo sapien
ggtggttggtgtaaatgagtgaggcaggagtccgaggaggttagttgtggcaataaaaatgattaaggatactagtataagagatcaggttcgtcctttagtgttgtgtatggctatcatttgttttgaggttagtttga

SEQ ID NO: 675 - DNA, 245 bp, Homo sapien
gttgggtggttggtgtaaatgagtgaggcaggagtccgaggaggttagttgtggcaataaaaatgattaaggatactagtataagagatcaggttcgtcctttagtgttgtgtatggctatcatttgttttgaggttagtttgattagtcattgttgggtggtaattagtcggttgttgatgagatatttggaggtggggatcaatagagggggaaatagaatgatcagtactgcggcgggtagg

SEQ ID NO: 676 - DNA, 621 bp, Homo sapien
  misc_feature (1)...(621): n = A,T,C or G
ctgtccccagggnaaatagtngaattcaactaagatctgttaataagatgtcagaataactaataattttattaggaaaaaatcatgttttaaatttcaaaatgacacttatttgtcaagtaatatgatcttggaaaattttaaagaaaaataatcctacttataaactacttttttataattgttttcagaaaaaaagtttacagtcttaaggaaaatattcaggtctatcatatggtttgacagattttttaaaagttatttttggtaaggtcttcttttagaaaaaaattaatctcaagggttttttgtaccactataatctctaatacttactcagaattactgtgtatttacttaatttcttattatgtgccttattatgtgcttaagatacaataggttagagtttaatctaaatatcttgaaagctatattgtgggcttggtaagcattttgttttttctttctctgttttggtaaggatttaaaatttttttcattgcaattttaagtggttttcaataagtaatagtttttatcaaatttttggtgcttggtgcagagacggcgtggggaagggtgaatggttttgggaataattcagtgcacacctggggg

SEQ ID NO: 677 - DNA, 210 bp, Homo sapien
  misc_feature (1)...(210): n = A,T,C or G
tttacataanatattatcagcatttaccatctcacttctaggaatactagtatatcgctcacacctcatatcctccctactatgcctagaaggaataatactatcactgttcattatagctactctcataaccctcaacacccactccctcttagccaatattgtgcctattgccatactagtctttgccgcctgcgaagcagcggtagg

SEQ ID NO: 678 - DNA, 383 bp, Homo sapien
  misc_feature (1)...(383): n = A,T,C or G
gtaggagtcaggtagttagggttaacgagggtggtaaggatggggggaattagggaagtcagggttagggtggttatagtagtgtncatggttattaggaaaatgagtagatatttgannaactgattaatgtttgggnntgagtttntatatcacagccanaattntatgatgnaccatgtancgaacaatgctacagggatgaatattatggagaagtantctantttgaagcttagggagagctgggttgtttgggttgnggctcantgtcagttccanataataacttcttggtctaggcacatgaatattgttgtggggaanagactgataataaaggtggatgcgacaatggattttacataatgggggtatnagtt

SEQ ID NO: 679 - DNA, 371 bp, Homo sapien
aaaatgaaaatattgacaagagtttcagatagaaaatgaaaaacaagctaagacaagtattggagaagtatagaagatagaaaaatataaagccaaaaattggataaaatagcactgaaaaaatgaggaaattattggtaaccaatttattttaaaagcccatcaatttaatttctggtggtgcagaagttagaaggtaaagcttgagaagatgagggtgtttacgtagaccagaaccaatttagaagaatacttgaagctagaaggggaagttggttaaaaatcacatcaaaaagctactaaaaggactggtgtaatttaaaaaaaactaaggcagaaggcttttggaagagttagaagaatttggaagg

SEQ ID NO: 680 - DNA, 176 bp, Homo sapien
cctaggattgtgggggcaatgaatgaagcgaacagattttcgttcattttggttctcagggtttgttataattttttatttttatgggctttggtgagggaggtaagtggtagtttgtgtttaatatttttagttgggtgatgaggaatagtgtaaggagtatgggggtaattatg

SEQ ID NO: 681 - DNA, 152 bp, Homo sapien
ctggagatggatatgagactagtcaagatgtgaatgctaattggagagaaatataattttaggaagatgcacattgatgtggggttttgatgtgtctgattttgactactcaagctctgtttacagaagaaaattgaatggcgagggtgtgg

SEQ ID NO: 682 - DNA, 141 bp, Homo sapien
ccagtgcttgcttgccgtggtttagtgattgggtgttagaaataaaaactcaggtctatttcttaccagtcagtaacaatttttagagaatgtacttggtatataatatatggacttcaggaactttgttggggtgggggg

SEQ ID NO: 683 - DNA, 308 bp, Homo sapien
ccagcaatggtacagagtgagggtgttctgctaatgacttcagagaagtatttaagaaaaacatagaaaaacgtgtgcggagtttgccagaaatagatggcttgagcaaagagacagtgttgagctcatggatagccaaatatgatgccatttacagaggtgaagaggacttgtgcaaacagccaaatagaatggccctaagtgcagtgtctgaacttattctgagcaaggaacaactctatgaaatgtttcagcagattctgggtatcaaaaaactagaacaccagctcctttataatgcatgtcag

SEQ ID NO: 684 - DNA, 277 bp, Homo sapien
tggtattaggattaggatgtgtgaagtatagtacggatgagaaggttggggaacagctaaataggttgttgttgatttggttaaaaaatagtagggggatgatgctaataattaggctgtgggtggttgtgttgattcaaattatgtgttttttggagagtcatgtcagtggtagtaatataattgttgggacgattagttttagcattggagtaggtttaggttatgtacgtagtctaggccatatgtgttggagattgagactagtagggctagg

SEQ ID NO: 685 - DNA, 457 bp, Homo sapien
  misc_feature (1)...(457): n = A,T,C or G
ctgtggcgtnccctacttctcccaaacctcgcaactccctcccaggacagtcagtgccaaagaaacaggtcgctgaaaactaaaatgtccacatccctaactggcaacccacatcaaccccaaaaggttgaagaatcatctaagatatttcagatgctctatgaagaaattcactttaacacttataactgtaagactttgcatacattacaacagtgcattagtgatacaagttgtaaaatacgtttccattcctttggattttgcatatgatggttttgcatcagtcactgcaggtagattgagcaagctttttgtgtttgtttttttaaacatgcattcaactagatatgattcagaatagattaatactccctttttatcactacagttagctaaaaaattgccaggcagtccacaaaacagaatttgctttaagaccaacccacagagtcag

SEQ ID NO: 686 - DNA, 234 bp, Homo sapien
  misc_feature (1)...(234): n = A,T,C or G
ntggatttataaaatagttgcaatgacaaaagaagtatgttttgacagtaaaaaaaagacattatggacaaaatatgcaaaatgtgcaaagaaaaaataaatttgcattagaaaggtgggcatttgatctctgagccctgtgccatgtaacattgccatgttctttcactgttgtttgaatgttgtaccccagcccttgactctggacttaaggcaagctatgactggctttgg

SEQ ID NO: 687 - DNA, 315 bp, Homo sapien
  misc_feature (1)...(315): n = A,T,C or G
nngtctgtgaaaaactctttggatgattctgccaaaaaggtacttctggaaaaatacaaatatgtggagaattttggtctaattgatggtcgcctcaccatctgtacaatctcctgtttctttgccatagtggctttgatttgggattatatgcacccctttccagagtccaaacccgttttggctttgngtgtcatatcctattttgtgatgatggggattctgaccatttatacctcatataaggagaagagcatctttctcgtggcccacaggaaagatcctacaggaatggatcctgatgatatttggcag

SEQ ID NO: 688 - DNA, 522 bp, Homo sapien
  misc_feature (1)...(522): n = A,T,C or G
ctgaattagaggaggagaaaagaagccattnnggagtactttaattgtttagatgtgagaggctgaatgtttgggttaagatgttagttgtcagaatcatgagaaaaggttttaagcaaggggcatttctaattctaaaaataacaactactgttatttattgagcactatctttttgttgggtactgtctaaagtacttgatttattttttaaaaccttacaaaaaacttacaaggtaggtactgaaagattcagtaatttgttcaaagtcacacagcaaataagcaacagactctggatttgaaccaggcaatcctagagcctgtactgttagtaattatactttagcacctgtcaagaattcctgttgagtgtcaagaagcaancaccaagttaggatttaaagcaaacatgattgaagaatactgtggtgtggttgacagtagtgcctaagtctgttttcagagtgaaaaatgacaaattagattttaagtatggtttggagataatatcaggacagt

SEQ ID NO: 689 - DNA, 158 bp, Homo sapien
  misc_feature (1)...(158): n = A,T,C or G
tctcaacttantntnatacccacacccacccaanaacagggtttgttaggnattgtttgcattaataaattaaagctccatagggtcttctcgtcttgctgtgtcatgcccgcctcttcacgggcaggtcaatttcactggttaaaagtaagagacag

SEQ ID NO: 690 - DNA, 300 bp, Homo sapien
  misc_feature (1)...(300): n = A,T,C or G
tagaactcgtatttttaaacttctattctctanccttttccactacattatgacacaagaccctgcagaaagtcgtctggaaaatatcagaccatctcttacttgtcccatccaatcttacatcgaattatatgcacccttaaaaagttatttggagttttaaaaaactctattagcccaaattacctgaaataaactcctggcttgttcccctaatgtttataaaaaattgattgaaaatattcattttaaaaatgaagntcttgaatttatttaaattactgtcttgcagtgagttgg

SEQ ID NO: 691 - DNA, 305 bp, Homo sapien
ctgttcagaaagctcattggacctggttttgaaaataaaacaaagttaaaaccctgggaggagttattgtgcagtgtggagtactcaggctttcttataaagaaaaaaaaagttatctggtaccaaagtgtgcaacctacagaccctcaggtactgccctgtgacttctctgtatgacatcacaaggctgccaagtgcctgtttttctagaactaggagttggtgaggtttggctagtgctgaaaccatgcataggattggtttactaaattaaaaccttattacgtacgtcctccaaaagacag

SEQ ID NO: 692 - DNA, 582 bp, Homo sapien
caggaaatggataaccattttaactgtattttttgcagcccgtaccttcttgggaatacaattgtctaactttttatttttggtctggctgttgtggtgtgcaaaactccgtacattgctattttgccacactgcaacaccttacagatgtggaagatgtgaaatttgtcatcaattatgactaccctaactcctcagaggattatattcatcgaattggaagaactgctcgcagtaccaaaacaggcacagcatacactttctttacacctaataacataaagcaggtgagcgaccttatctctgtgcttcgtgaagctaatcaagcaattaatcccaagttgcttcagttggtcgaagacagaggtgcaggtaaggatgactgataggaaatgttggtagttacgagtcacatcgttgtctacaaatccatttaaatggtattggagggtgagtaaaaccttgaatgtgaaaacttaagctgaaaaattgtaaaaacatttcacgcctaccatgaatagatctgtttctttctgtccacaatgatttgtgtcatagacataattgatcaatttgcaattg

SEQ ID NO: 693 - DNA, 275 bp, Homo sapien
ccaattgatttgatggtaagggagggatcgttgacctcgtctgttatgtaaaggatgcgtagggatgggagggcgatgaggactaggatgatggcgggcaggatagttcagacggtttctatttcctgagcgtctgagatgttagtattagttagttttgttgtgagtgttaggaaaagggcatacaggactaggaagcagataaggaaaatgactatgagggcgtgatcatgaaaggtgataagctcttctatgataggggaagtagcgtcttg

SEQ ID NO: 694 - DNA, 397 bp, Homo sapien
  misc_feature (1)...(397): n = A,T,C or G
nggtctgcatttttattgcgatctgcagatgaactggaaaatctcattttacaacagaactgagacagacgaccaccatattcactgaggtctaaatttgcagtttccactaatgacattttgatttcccaacagagatacttctggtcttactgcacagtcttttaagagaaatacttccattatgccacattgtccttgatccgtaagtgatgtgttaaggtgcttcaaaggaactctgacctctgaagtacttgagctactttagtatgtccagcctattgctttttgttttagtgtgtcaccataaatatcaggggcataaaaggctatctattcttaattcaaggataaaacagaagaagcttgtggtataaaacaatagttcaagatccag

SEQ ID NO: 695 - DNA, 609 bp, Homo sapien
  misc_feature (1)...(609): n = A,T,C or G
ctgagcttccatttgtcagctagcactgnggtagtcaaccatgcgaatgaggctattttggacctcatgattgtccagtgcctgggctgataccgngggaaacgaaattttgtggctgcccacaaaatcatggaaaataatgattttttagaaaacctccactgntttgttgtgcagcaataaataactgaaacaccaatccaaaaaacttataaagctataacaattaaaacagnataataatagtnccgggatacaaaaatggtcaaattgaagaggatacaaagcctcaaagcagtcctcactcataananccttgttgtatcactaaaanggcattaaaattgagaanaaggaanaactagtggattaattaataaatgagaagtatccataaggaaaaattaaaattnnattcttgcttcacattatgaaaaaatacaaacaacagattgattaaagacttaaatgngatcaacaaaatgttaaaactgtgataagaacatttaagaaaatagttctatnaccctgggataaaacattttcntccaaggcattaaagtgttaaatgaaaagactgatncatttattcattagaatttaaattcn

SEQ ID NO: 696 - DNA, 300 bp, Homo sapien
ctgcaaaataagcgtgctaaattaaattgtcttaaggtttttccacttcattttgtgactttgtgtggttcgaatttctcagtattttaaccagtgtgttgatgttaaagtcaaaggctgcagtatgtctatattcttgctgtactcattggtagtttcagtatatgtaatgtgagtttaaatagtgaaattgtatctcatattaacatttcaaatgctcatattgaaaatggaaaatagtaaacacgggaattgattttattctggttgtctataatacttcattttaaatgtaaatgg

SEQ ID NO: 697 - DNA, 391 bp, Homo sapien
  misc_feature (1)...(391): n = A,T,C or G
nngtcatgtntgatgnatctgancaggttgctccacaggtagctctaggagggctggcaacttagaggtggggagcagagaattctcttatccaacatcaacatcttggtcagatttgaactcttcaatctcttgcactcaaagcttgttaagatagttaagcgtgcataagttaacttccaatttacatactctgcttagaatttgggggaaaatttagaaatataattgacaggattattggaaatttgttataatgaatgaaacattttgtcatataagattcatatttacttcttatacatttgataaagnaaggcatggttgtggttaatctggtttatttttgntccacaagttaaataaatcataaaacttgaacaaaaaaaaa

SEQ ID NO: 698 - DNA, 536 bp, Homo sapien
  misc_feature (1)...(536): n = A,T,C or G
ctgagcatacagcaataaaaataacataatttttatgtgtacaatatttatggaatacgttactggaacagataaataatttagttaataacatgacaaagaacagaaattgtatacactatacagcatagtaatagaataatgaatgattaaagttattaatattaggtagaaaatgaagggtatctttgagagcagaactcaaggaagcaagcaatttgccttatgaggaaagagttacctgtggataaaggagaaactgaaaaatttacaagtcaagactttttgagcaaagacaaaaatatgactatgagtcaccaattcagtacagtgaaaaaaaagttgaagagatatcttggaagtaaaccatgttgtggaagagcagggttttgataatcatgggattattctgaatgaattttaaatgcgataggaatatatgagataatttcaccagagaataatatgatcatgtttgcatttcaaaggggtgtatctggtgcactgngtagaataaataggntatgtgagcaagt

SEQ ID NO: 699 - DNA, 419 bp, Homo sapien
  misc_feature (1)...(419): n = A,T,C or G
ngtccacctgagggcaggtgacaaggacctgacagagcccatgcagggctttagatttggacacacaagagttgataacttcctcatgaactccttgcctgatctaaactcatattatgggttctgactgtttgagtaatcatcttcaaggttaaacctcttggcagttacccttttcacaaagtgcacagtgggaatcgagaatcgatagggttaattttggagcagtggcttataccattcacctctgtttttttgtgattatttcacagataatgagaccttaataacaaataggcgtaaaaaaattttcacattgaaatgatagaaacatttgatgtaataaaacttggttggcttgatattttaaggaattgaaacctagcaatcttattggagagacaagaattggtctccag

SEQ ID NO: 700 - DNA, 336 bp, Homo sapien
ccacttattgtccttaaaaatccatactgatacatggacagtaagtgtgttttcagatggagtaccagcaccgaaaatgggttgagggaggatgggttgtatgtatgtttctgcccactaattttgagcagccatattatgaattaaatcgtcacagccaagtaataacccaagaatggtatgagtttcatgtgtaatagctcaaatggaataagcatgaatgctggagtggaccattatcctcaaatattctatgtcacttctcatttaaagactcttgttatgaactattagaaactttaggcaaaatcaaaagtatttgcggcaaaataaagg

SEQ ID NO: 701 - DNA, 418 bp, Homo sapien
ccatgtgatgatgttgacaacccctgaagagcctcagtccattgttccacgtttaagaactaggaataccaggactgatgcaattctactgggtcactatcgcttgtcacaagacacagacaatcagaccaaagtatttgctgtaataactaagaaaaaagaagaaaaaccacttgactataaatacagatattttcgtcgtgtccctgtacaagaagcagatcagagttttcatgtggggctacagctatgttccagtggtcaccagaggttcaacaaactcatctggatacatcattcttgtcacattacttacaaatcaactggtgagactgcagtcagtgcttttgagattgacaagatgtacacccccttgttcttcgccagagtaaggagctacacagctttctcagaaagg

SEQ ID NO: 702 - DNA, 261 bp, Homo sapien
  misc_feature (1)...(261): n = A,T,C or G
gggcctgttgtgggggtgggggaagcagggaggggaacagctaaataggttgctgttgatttggttaaaaaatagtagggggatgatgctaataattaggctgngggtggttgtgttgattcaaattatgtgttttttggagagtcatgtcagtggtagaaatataattgttgggacnattagntttagcattggagtaggtttaggttatgtacgtagtctaggccatatgtgttgganattgagactagtagggctagg

SEQ ID NO: 703 - DNA, 261 bp, Homo sapien
  misc_feature (1)...(261): n = A,T,C or G
gggcctgttgtgggggtgggggaagcagggaggggaacanctaaataggttgctgttgatttggttaaaaaatagtagggggatgatgctaataattaggctgngggtggttgtgttgattcaaattatgtgttttttggagagtcatgtcagtggtagtaatataattgttgggacnattagntttagcattggagtaggtttaggttatgtacgtagnctaggccatatgtgttggagattganactagtagggctagg

SEQ ID NO: 704 - DNA, 381 bp, Homo sapien
  misc_feature (1)...(381): n = A,T,C or G
ngtntgaattctattaaagatacaaagaggagctggtaccatttcttctgaaactattacaaacaactgaaaaggtggaatttctccctaattcattttaggaggccagcattatactgataccaaaacctggcagaggtacaataataaaaggaaacttcaagtcagtatcactgatgaacaccaatgtgaaaatcctcaataaaatactggcaaactgaattcagcagcacatcaaaaagctaatccaccacaatcaagtcagcttcatccctgcgatgcaagtctggttcaacatatgcaaatcaataaatacaattcatcagataaacagagctaaagacaaaattcacatgattttctcaatagatgcagaaaagg

SEQ ID NO: 705 - DNA, 477 bp, Homo sapien
ctgaaccctcgtggagccattcatacaggtccctaattaaggaacaagtgattatgctacctttgcacggttagggtaccgcggccgttaaacatgtgtcactgggcaggcggtgcctctaatactggtgatgctagaggtgatgtttttggtaaacaggcggggtaagatttgccgagttccttttactttttttaacctttccttatgagcatgcctgtgttgggttgacagtgagggtaataatgacttgttggtgattgtagatattgggctgttaattgtcagttcagtgttttaatctgacgcaggcttatgcggaggagaatgttttcatgttacttatactaacattagttcttctatagggtgatagattggtccaattgggtgtgaggagttcagttatatgtttgggattttttaggtagtgggtgttgagcttgaacgctttcttaattggtggctgcttttagg

SEQ ID NO: 706 - DNA, 266 bp, Homo sapien
  misc_feature (1)...(266): n = A,T,C or G
ccatggctaggtttatagatagttgggtggttggtgtaaatgagtgaggcaggagtccgaggaggttagttgtggcaataaaaatgattaaggatactantataagagatcaggntcgtcctttagtgttgtgtatggctatcatttgttttgaggntagtttgattagtcattgttgggtggtaattagtcggttgttgatgagatatttggaggtggggatcaatagagggggaaatagaatgatcagtactgcggcgggtagg

SEQ ID NO: 707 - DNA, 358 bp, Homo sapien
  misc_feature (1)...(358): n = A,T,C or G
ccatcagagaaatgcaaatcaaaaccacaatgagataccatctcacaccagttagaatggcaatcattaaaaagtcaggaaacaacaggtgctggagaggatgtggagaaataggaacacttttacaccgntggtgggactgtaaactagttcaaccattgtggaagtcagtgtggcgattcctcaaggatctagaactagaaataccatttgacccagccggccaatattcaacattcttaaaggaaagaattttcaacccagaatttcatatccagccaaactaagcttcgttagtgaaggagaaataaaatactttacagacaagcaaatactgagagattttgtcaccaccagg

SEQ ID NO: 708 - DNA, 491 bp, Homo sapien
  misc_feature (1)...(491): n = A,T,C or G
cctactatgggngttaaattttttactctctctacaaggttttttcctagtgtccaaagagctgttcctctttggactaacagttaaatttacaaggggatttagagggttctgtgggcaaatttaaagttgaactaagattctatcttggacaaccagctatcaccaggctcggtaggtttgtcgcctctacctataaatcttcccactattttgctacatagacgggtgtgctcttttagctgttcttaggtagctcgtctggtttcgggggtcttagctttggctctccttgcaaagttatttctagttaattcattatgcagaaggtataggggttagtccttgctatattatgcttggttataatttttcatctttcccttgcggtactatatctattgcgccaggtttcaatttctatcgcctatactttatttgggtaaatggtttggctaaggttgtctggtagtaagggnggagtgggtttg

SEQ ID NO: 709 - DNA, 460 bp, Homo sapien
  misc_feature (1)...(460): n = A,T,C or G
nggttttttttgtagagcaaataatttatgcaaaatatgttacaaaatctgggatgctaaatagttgacacaagtactgtgtttgacatttagtttcatttgaattagtaatagaatttgctccttccaacatttacatcttttttctttctgactttatatattttcaataaaaatttgctccacagtttttaagntcattcttcttgaatccgnttttacatttgctgngacaaacctgcataaaactagattttatagatataacttctttggaagagataaaaattcaaaagtttgacattgctttcanttattcttttcttcattgttttgattggcccctgttagattgatgtattgccaatctacttttgatggcatgaatntaaaatgacaacataaaaagcncttctagtgcaacagtaattgaaacttgcagttttccattaaaaaaaaa

SEQ ID NO: 710 - DNA, 542 bp, Homo sapien
  misc_feature (1)...(542): n = A,T,C or G
ctgttacagtgacaagagataaaaagatagacctgcagaaaaaacaaactcaaagaaatgtgttcagatgtaatgtaattggagtgaaaaactgtgggaaaagtggagttcttcaggctcttcttggaagaaacttaatgaggcagaagaaaattcgtgaagatcatagatcctactatgcgattaacactgtttatgtatatggacaagagaaatacttgttgttgcatgatatctcagaatcggaatttctaactgaagctgaaatcatttgngatgttgtatgcctggtatataatgtcagcaatcccaaatcctttgaatactgtgccaggatttttaagcaacactttatggacagcagaataccttgcttaatcgtagctgcaaagtcagacctgcatgaagttaaacaagaatacagtatttcacctactgatttctgcaggaaacacaaaatgcctccaccacaagccttcacttgcaatactgctgatgcccccagtnaggatatctttgttaaattgacaacaatggacctg

SEQ ID NO: 711 - DNA, 394 bp, Homo sapien
  misc_feature (1)...(394): n = A,T,C or G
caaacccactccaccttactaccagacaaccttagccaaaccatttacccaaataaagtataggcgatagaaattgaaacctggcgcaatagatatagtaccgcaagggaaagatgaaaaattataaccaagcataatatagcaaggactaacccctataccttctgcataatgaattaactanaaataactttgcaaggagagccaaagctaagacccccgaaaccagacgagctacctaagaacagctaaaagagcacacccgtctatgtagcaaaatagtgggaagatttataggnagaggcgacaaacctaccgagcctggtgatagctggttgtccaagatagaatcttagttcaactttaaatttgcccacagaaccctctaaatccc

SEQ ID NO: 712 - DNA, 552 bp, Homo sapien
  misc_feature (1)...(552): n = A,T,C or G
gaggtctgtanaatgccaggctcaaatttgtctttataatttaataccagaaatctttcccttgtgatgtttctttctttctggattgcctctatagcaggggatagcgggggaggataaggcacatctttgntgtactgagaaatttgaccacgcaggatgatgtggctgttctcattcatctgcacagagaaaaataatgataaaatatccctttcctatgtttactgattttatggctgccataatggaagcctccttgactatttaatcctttctgtcaactaggttcgattttttttttaatttacctgttagaggtatttaanaattttaactagctanaaataattacattccaaaggaacaccaaggcaaataaatggttggtaatcagcaaaagaattacattagttgttgntgctacttattagggggagaactgtttttttttaaatttaaacaatttaataatctcaactgcaaataattttagatgcagcaaaggactatgtagncgttaatacctcatgttgatattttcataatatt

SEQ ID NO: 713 - DNA, 518 bp, Homo sapien
  misc_feature (1)...(518): n = A,T,C or G
ccaaaaactggaagcagctcactaaacaaacagtggcatacccatagaactgcatacttctcagcagtatgaaagaatgagctacttatataagcatcattgataaacctcaaaaaaaaaatgccacatgaanaaacccaaagggganaaacataaaaactttatatgtcagtcatataaaattctanaaaatgcaaactaatccatcntaaaggaaagtaaatcaacagttgtctggaggaccananagagcaggaggaganagattattaaaggggttaaagtaaatttgggagtgcccttccntttttaaatnctatgaaaatgaaagtaaaggcncatgcatgttgtaaactaatagtaacaaacanaatgggttggagtggggtgttgtctggggacatcattacaaaatgtaagccagtttatntaaattttgaaaagaccgtggactctgatctgactgatnaatgttggaagagataagtgtgctgcaaatgggggaattaataaaacag

SEQ ID NO: 714 - DNA, 281 bp, Homo sapien
ccaattgatttgatggtaagggagggatcgttgacctcgtctgttatgtaaaggatgcgtagggatgggagggcgatgaggactaggatgatggcgggcaggatagttcagacggtttctatttcctgagcgtctgagatgttagtattagttagttttgttgtgagtgttaggaaaagggcatacaggactaggaagcagataaggaaaatgactatgagggcgtgatcatgaaaggtgataagctcttctatgataggggaagtagcgtcttgtagacc

SEQ ID NO: 715 - DNA, 443 bp, Homo sapien
cttgaaatcagcaacacacttacaaatgagaaaatgaaaatagaagagtatataaagaaagggaaagaggattatgaagagagtcatcagagagctgtggctgcagaggtatccgtacttgaaaactggaaggagagtgaagtgtataagctacagatcatggagtcacaagcagaagcctttctgaagaagctggggctgattagccgtgatcctgcagcatatcccgacatggagtctgatatacgttcatgggaattgtttctttctaatgttacaaaagaaattgagaaagcaaagtctcagtttgaagaacaaattaaggcaattaaaaatggttcccggctcagtgaactttctaaagtgcagatttctgagctttcatttcctgcctgtaacacggttcatcccgagttactccctgagtcttcaggccacgatgg

SEQ ID NO: 716 - DNA, 639 bp, Homo sapien
  misc_feature (1)...(639): n = A,T,C or G
ccaaanaaaatgaagtacagagtctgcatagtaagcttacagataccttggtatcaaaacaacagttggagcaaagactaatgcagttaatggaatcagagcagaaaagggtgaacaaagaagagtctctacaaatgcaggttcaggatattttggagcagaatgaggctttgaaagctcaaattcagcagttccattcccagatagcagcccagacctccgcttcagttctagcagaagaattacataaagtgattgcagaaaaggataagcagataaaacagactgaagattctttagcaagtgaacgtgatcgtttaacaagtaaagaagaggaacttaaggatatacagaatatgaatttcttattaaaagctgaagtgcagaaattacaggccctggcaaatgagcaggctgctgctgcacatgaattggagaagatgcaacaaagtgtttatgttaaagatgataaaataagattgctggaagagcaactacaacatgaaatttcaaacnaaatggaagaatttangattctaaatgaccaaaacanagcattaaaatcagaagttcagaagctgcagactcttgtttctgcacangcctaataaggatgntgnggaacaaatggaaaaattg

SEQ ID NO: 717 - DNA, 473 bp, Homo sapien
  misc_feature (1)...(473): n = A,T,C or G
nntgaggctactgctgttttattacaacattacctcttgtttttataaagtgtaccaagatttaaattgataactttattttacttgaaaaaaaaaagtttnttttatcaccagtgttacagttgtcttctgtttctttttgttttgntttatttgntttcctttttagccaaagagtgaacagaanattttcttattttggtggctattcattttacttttaaaagtgattggtggattttagactaattatgggggaatttgccaccaaaataaaaaatatgtaaagngtagtgattacagagtggttaaaatgtgggttagtacttatttattccattaattgattatttgactgtttataaagaaagttgctttatttctttaaacatcttcaaaagatgatcctttcttgtcacattatagccaaaagaagcagagaacttcactgtctgcatttggttcctggttgg

SEQ ID NO: 718 - DNA, 207 bp, Homo sapien
ggtaaatgctagtataatatttaccatctcacttctaggaatactagtatatcgctcacacctcatatcctccctactatgcctagaaggaataatactatcactgttcattatagctactctcataaccctcaacacccactccctcttagccaatattgtgcctattgccatactagtctttgccgcctgcgaagcagcggtagg

SEQ ID NO: 719 - DNA, 255 bp, Homo sapien
  misc_feature (1)...(255): n = A,T,C or G
cctatattacggatcatttctctactcagaaacctgaaacatcggcattatcctcctgcttgcaactatagcaacagccttcataggctatgtcctcccgtgaggccaaatatcattctgaggggccacagtaattacaaacttactatccgccatcccatacattgggacagacctagttcaatgaatctgaggaggctactcagtagacagncccaccctcacacgattctttacctttcacttcatcttgcc

SEQ ID NO: 720 - DNA, 455 bp, Homo sapien
  misc_feature (1)...(455): n = A,T,C or G
ccaatgtcgaaacctacaagatttccttaaaatctctaatagaggcattacttgctttcaattgacaaatgatgccctctgactagtagatttctatgatccttttttgtcattttatgaatatcattgattttataattggtgctatttgaanaaaaaaatgtacatttattcatagatagataagtatcaggtctgaccccagtggaaaacaaagccaaacaaaactgaaccacaaaaaaaaaggctggtgttcaccaaaaccaaacttgttcatttagataatttgaaaaagctccatagaaaaggcgtgcagtactaagggaacaatccatgtgattaatgnttncattatgttcatgtaanaagccccttatttttagccataattttgcatactgaaaatccaataatcagaaaagtaattttgccacattatttatnaaaaatgttcc

SEQ ID NO: 721 - DNA, 530 bp, Homo sapien
  misc_feature (1)...(530): n = A,T,C or G
ccagtgcttgctgccgtggtttagtgattgggtgttagaaataaaaactcaggtctatttcttaccagtcagtaacaatttttagagaatgtacttggtatataatatatggacttcaggaactttattggggnggggggttaattttgccttaccctgttcactttcagatgattaggcttttgcactttagaatgagaaacttgtgacgttagtgtgttcttactagctttaatttgtatgtagcaatgaattgtgaatcttagtgcagtgggtttttttaaaaaactcaaaaagctgggaattaagtggtttcagtaataatgctataccgaggtgcttgcattgtatttcataattttgttacaaaccaaaattatttttaatganaacggtcttgggttcagaggtgtgatgccagaatgtattttcgtactgttaggcccttggaacagataccggtgctttcttgaaagatgaaagaaatgcaatgggtgctcttcatgcaaggttgcaaacctaccaagaat

SEQ ID NO: 722 - DNA, 242 bp, Homo sapien
  misc_feature (1)...(242): n = A,T,C or G
ccaagggtcatgatggcaggagtaatcanaggtgntcttgtgttgtgataagggnggagaggttaaaggagccacttattagtaatgttgatagtagaatgatggctagggtgacttcatatgagattgtttgggctactgctcgcagtgcgccgatcagggcgtagtttgagtttgatgctcatcctgatnagaggattgagtaaacggctaggctagaggtggctagaataaataggagg

SEQ ID NO: 723 - DNA, 472 bp, Homo sapien
  misc_feature (1)...(472): n = A,T,C or G
cctactatgggtgttaaattttttactctctctacaaggttttttcctagtgtccaaagagccgttcctctttggactaacagttaaatttacaaggggatttagagggttctgtgggcaaatttaaagttgaactaagattctatcttggacaaccagctatcaccaggctcggtaggtttgtcgcctcnacctataaatcttcccactattttgctacatagacgggtgtgctcttttagctgttcttaggtagctcgtctggnttcgggggtcttagctttggctctccttgcaaagttatttctagttaattcattatgcagaaggtataggggttagtccttgctatattatgcttggttataatttttcatctttcccttgcggtactatatctattgcgccaggtttcaatttctatcgcctatactttatttgggtaaatggtttggctaangttgtctggtag

SEQ ID NO: 724 - DNA, 292 bp, Homo sapien
  misc_feature (1)...(292): n = A,T,C or G
nccaccactgcagccctacatacagntgaaaaaaaattccattctgttaacatttgttttataagttttcacncaatacacaaaaaacccctctgcacttcttgtaaagaacaaaaaagatacacaacagttaagcgtaaagatcacaggcaatagcattcaaacatggatgtgggnagagaaaggagtacctggcatgagtacctgcttagttngactgaatccttgatttttaatttggcttttcatgggccgntcacaacaccaacgctgngngaggtatggtagtcag

SEQ ID NO: 725 - DNA, 122 bp, Homo sapien
  misc_feature (1)...(122): n = A,T,C or G
atagaaagggcatacccaaaatgttactgaaaatntaatacaaattccaagattcaccaangaagtaacaaaaacctggcctgcangnggncccctatcccgtggctccatggntgatgtgg

SEQ ID NO: 726 - DNA, 477 bp, Homo sapien
  misc_feature (1)...(477): n = A,T,C or G
ctgaaccctcgtggagccattcatacaggtccctaattaaggaacaagtgattatgctacctttgcacggttagggtaccgcggccgttaaacatgtgtcactgggcaggcggtgcctctaatactggtgatgctagaggtgatgtttttggtaaacaggcggggtaagatttgccgagttccttttactttttttaacctttccttatgagcatgcctgtgttgggttgacagtgagggtaataatgacttgttggtgattgtanatattgggctgttaattgtcagttcagtgttttaatctgacgcaggcttatgcggaggagaatgttttcatgttacttatactaacattagttcttctatagggtgatagattggtccaattgggtgtgaggagttcagttatatgtttgggattttttaggtagtgggtgttgagcttgaacgctttcttaattggcggctgcttttagg

SEQ ID NO: 727 - DNA, 416 bp, Homo sapien
cctgtctttgaatggatgaaataggttaataaaaaacatcactgtttaaaaactagaacactgaaaaattctaggaaagcttattttcccttatatttttatggtactttcaacacttaataacactatttcaattaagttttctcctagagtttatagtatatcagtacattcttttctgtggatgcaataatatagaatcttattccaaatcttactggcaggttctcttaaattcttcaacggctgccatagtgattaaccaaaattagttatgatttctgcctatctgtgtgagaacttacaggggaaattgttctaaacctgaggaacatgaagtaactgtactgcacactccaaatgatgacagtcattttatatcaccttcaattacccaacagcttttaatagtctgg

SEQ ID NO: 728 - DNA, 416 bp, Homo sapien
  misc_feature (1)...(416): n = A,T,C or G
cctgtctttgaatggatgaaataggttaataaaaaacatcactgtttaaaaactagaacactgaaaaattctaggaaagcttattttcccttatatttttatggtactttcaacacttaataacactatttcaattaagttttctcctagagtttatagtatatcagtacattcttttctgtggatgcaataatatagaatcttattccaaatcttactggcaggttctcttaaattcttcaacggctgccatagtgattaaccaaaattagttatgatttctgcctatctgtgtgagaacttacaggggaaattgttctaaacctgaggaacatgaagtaactgtactgcacactccaaatgatgacagtcattttatatcaccttcaattacccaacagcttttaatantctgg

SEQ ID NO: 729 - DNA, 564 bp, Homo sapien
  misc_feature (1)...(564): n = A,T,C or G
ctgtgagtagaggagtcttcccgagagtagcagttgttgatccaaatgattgaagccttcaggtaagggaataactgctgcaggaattctttcttgaagaatttaagctgtttggtaagaattctgtaactacatacctttgaaacactattcacattcaaataaacgcttgttttctagccaggcacaggctcaattagtttttcaaactctagccaaggcagtatttcatttgggaaatcatgcaacagaactgctcaattcttaacttctcctgctgttaacatttacacttagactgccagcaacagttaacttaaattttggtctcaagggaacaaaaaaaaattgcattcagaatttaatatagtattttaaaactaattttagcctgtaagncattatgagcaatagtaacttttatacctcctcatcttgnctgataatatattctatatgctgncaatctgattatatagtctatatgctagaagttgctgattttcattctgccaccaaaaaaaactgtccttttttttttatgggggaaaaagggaatttaaa

SEQ ID NO: 730 - DNA, 310 bp, Homo sapien
ccatttttatttcttcttcagagaagtgtttatttaggtctgttgcccattttacaattaggccatatgttttcttgctgttgagttgtatgtgtgtttgtataaattttgcatattaaccccttatcacacgtatgttttttaaaataaattttgcttattaatcttttatcagatgtatggtttccaaatatattcttccgatccatggattctcttttttgttatgattgtttctttgctcttcggaagctttttgttttgttttgttatttgttttactttgatatagtcccatttattgtttttg

SEQ ID NO: 731 - DNA, 467 bp, Homo sapien
  misc_feature (1)...(467): n = A,T,C or G
ngacaaccttagccaaaccatttacccaaataaagtataggcgatagaaattgaaacctggcgcaatagatatagtaccgcaagggaaagatgaaaaattataaccaagcataataaagcaaggactaacccctataccttctgcataatgaattaactagaaataactttgcaaggagagccaaagctaagacccccgaaaccagacgagctacctaagaacagctaaaagagcacacccgtctatgtagcaaaatagngggaagatttataggnagaggcgacaaacctaccgagcctggtgatagctggttgtccaagatagaatcttagntcaactttaaatttgcccacagaaccctctaaatccccttgtaaatttaactgntagnccaaagaggaacagntctttggacactaggaaaaaaccttgtagagagagtaaaaaatttaacacccatagtagg

SEQ ID NO: 732 - DNA, 492 bp, Homo sapien
  misc_feature (1)...(492): n = A,T,C or G
cctactatgggtgttaaattttttactctctctacaaggttttttcctagtgtccaaagagctgttcctctttggactaacagctaaatttacaaggggatttagagggttctgtgggcaaatttaaagttgaactaagattctatcttggacaaccagctatcaccaggctcggtaggtttgtcgcctctacctataaatcttcccactattttgctacatagacgggtgtgctcttttagctgttcttaggtagctcgtctggnttcgggggtcttagctttggctctccttgcaaagttatttctagttaattcattatgcagaaggtataggggttagnccttgctatattatgcttggntataatttttcatctttcccttgcggtactatatctattgcgccaggtttcaatttctatcgcctatactttatttgggtaaatggtttggctaaggttgtctggtagtgaggcggagngggtttggg

SEQ ID NO: 733 - DNA, 562 bp, Homo sapien
  misc_feature (1)...(562): n = A,T,C or G
ntgaaatggcaatagcattcactgtcgtattttgcagtgctcaggaagtgggacgttaactttgaaggtgcttgtttgtattagctctgctaggtttacctctacaacgtagatttcagcagctatgctgactgacactacattctagttcttaagattttttttccanatccccccttccccagctagacatacgtagcatactttcatcttattcagtctttctgtaacctgctgctgcttttagtcctcctcacctcagatcggaatcaatggagtgggcccagaggatacattttaattccagtaatggtaggtagatttgtcctgctttctaaaacatctcctcatttcatatttccactccatattgattccataagggaaaattaatgggtgnttcctcctttagggaggcaatgcaaagagngtggacatcttctaatcttgaggaacagtngttgatttcccttgaaggagcttacatattgactgtntttcacaataacctgnttgccccagntcaatccctcattttaatacttaatgttggtnctgggct

SEQ ID NO: 734 - DNA, 265 bp, Homo sapien
  misc_feature (1)...(265): n = A,T,C or G
nggtccagaacaagagaaataactgcagaaaacacatatggttggaaaccatgcgcttgtgactttttctgtagcctatgggagtggacagagtgggtaacccaagatgtttttaagactgactggactaagaatggcgtacttatagccaactacttcccccctaatgtgactgaagggattcataatgatcacaattagcattacggttaagtattttagggttgacgtctaagctcacacttgaaaggtatttatctaatgg

SEQ ID NO: 735 - DNA, 216 bp, Homo sapien
atttaatacgtgctcactgctcggcacgcgctgaagctacagttaacaatcagtgagcacatattaaatgataaaataatgctgatggtaaacattcataacagcagagtaagattttggcagttttgtgtctcggtaacataactgtaaccttagatgaacacctatcccttcatgatctgactttagaggcaaggagtttgtaacatctaatgg

SEQ ID NO: 736 - DNA, 285 bp, Homo sapien
  misc_feature (1)...(285): n = A,T,C or G
ctgaaaggcaacntggagactagttagtctagtcccctcatattataaattggtatgctgaggccaggcagtaaattgctatggagctctccaatttaaggccagtttgactccaagggtagggcttctagtaaaattttgtgattaaattggaaactctaatttatttttctatgngtttttggtacctaatcctcataagcaagccatatttcaaggctgatcaatgaaaacaccaaataccaaagcttcctttcccttccaaatttactgaccctttgtcag

SEQ ID NO: 737 - DNA, 509 bp, Homo sapien
  misc_feature (1)...(509): n = A,T,C or G
agangaagaagangaagattaagggaaaagtacatcggtcaagaagagctcaacaaaacaaagcccatctggaccagaaatcccgacgatattactaatgaggagtacggagaattctataagagcttgaccaatgactgggaagatcacttggcagtgaagcatttttcagttgaaggacagttggaattcagagcccttctatttgtcccacgacgtgctccttttgatctgtttgaaaacagaaagaaaaagaacaacatcaaattgtatgtacgcagagttttcatcatggataactgngaggagctaatccctgaatatctgaacttcattagaggggtggnagactcggaggatctccctctaaacatatcccgtgagatgttgcaacaaagcaaaattttgaaagttatcangaagaatttgggtcaaaaaatgcttanaactctttactgaactggcggaagatnaagagaactncaaganattctatgagcagntctctt

SEQ ID NO: 738 - DNA, 97 bp, Homo sapien
cagtgaattgaatacgactcctatagggcgaattgggccctctagatgcatgctcgagcggccgccagtgtgatggatatctgcagaattcgccctt

SEQ ID NO: 739 - DNA, 209 bp, Homo sapien
  misc_feature (1)...(209): n = A,T,C or G
ccgncagtgtgatggatatctgcagaattcgcccttagcggcccgcccgggcagggtccttatatatagtagcttagtttgaaaaaatgtgaaggactttcgtaacggaagtaattcaagatcaagagtaattaccaacttaatgtttttgcattggactttgagttaagattattttttaaatcctgaggactagcattaattgacgg

SEQ ID NO: 740 - DNA, 164 bp, Homo sapien
ccaagctaatgggtgacactgtgaatgcaactctaatgcagcctggcgtaaatggtcctatgggcactaactttcaagttaacacaaacagaggaggtggtgtgtgggaatctggtgcagcaaactcccagagtacatcatggggaagtggaaatggcgcaaat

SEQ ID NO: 741 - DNA, 514 bp, Homo sapien
  misc_feature (1)...(514): n = A,T,C or G
ccagtcagaattgagatgtgctgtgagtgcaaaatacactcaaatctaagacttagtatggaagaaaaagaagataaggtgnttcattaataatcttttatattgattacatgttgaaatgatatttttaatatactgggttacataaactgttattaagattaattttgcttgtttcttttttaatatggctactagaaaattaaaaattatgttgtggttcacattatatttctgttgaacaatgtggacatagataatctacagtcattacattagccttagaatttagcatcatacttttaagcactctggggtactaacttgaactcccagaaacccataagcacactctgcatataaattattgcaaaattcattcttatctctctgaaagatatgcattttaagggtaaaaagaattcacaaaatattgantccttaacaaatgtcaattagtatatggagagagctaaaggacttcntgtagactggtncattggggaaaaacaga

SEQ ID NO: 742 - DNA, 439 bp, Homo sapien
  misc_feature (1)...(439): n = A,T,C or G
gcaggtcctatgcatagttaataagggntataatctactcaacatggaaaatgggagcctatttgcaaacacacgagtaattaaagtaccaattctctcttagtttctttttttatagttggnttattttgcaattataaatgntaaacatccctagagatgaaagttaaaatggctgatcacagatcagtagcaaaatacaaattgacaattcaaaattataaataaaactctgttgaggatgtttaactttgagcctccaaatttaagagctaagcttggaagaaacaaatttataggttatatttccctcttaaattaaaaaacaaacttcctctggcagtagnttgtgaattcctttcattgnaatgataccatgattacaggatcaaaaatgcttaacttacttgccattctgctcacatcatcacagttgttt

SEQ ID NO: 743 - DNA, 275 bp, Homo sapien
  misc_feature (1)...(275): n = A,T,C or G
cangacgctacttcccctatcatagaagagcttatcacctttcatgatcacgccctcatagtcattttccttatctgctccctagtcctgtatgcccttttcctaacactcacaacaaaactaactaatactaacatctcagacgctcaggaaatagaaaccgtctgaactatcctgcccgccatcatcctagtcctcatcgccctcccatccctacgcatcctttacataacagacgaggtcaacgatccctcccttaccatcaaatcaattgg

SEQ ID NO: 744 - DNA, 295 bp, Homo sapien
  misc_feature (1)...(295): n = A,T,C or G
ctgtncttttaaaaaatctggatgttttttatttagtgattgttcgacaattagctgcttcaaaacataatgtgcattgcttatgaatgccttcatatactaatacagatactctgataatattacactctaataaggataatgctgaattttgaaaggacacaaaacatctaatgccaatatatacatgattagccaacatctttgctatcaagaccactcgtttttaaataaagatgcaagtgtcagttgtagattattgggatgaagctaaatccccagaatgcagcagcag

SEQ ID NO: 745 - DNA, 477 bp, Homo sapien
  misc_feature (1)...(477): n = A,T,C or G
cgcgttactgtacatattgctagcaggagacaactggaaatactaaacaaatactggaattcacattacagacagacgaaaccaacatggatgccacacataacttcctttgtagtttcacagagagcctatttgtggttgctcaggtggggtcatacattgcttgcagaaatggcctgatcatagctctatgaaacaatgaattcggaatgaaatcttaccatgacacctctctgtaggaaagaaatgttgcttcacgtgtgctaagttgagataataatatttcacatatttatatacagagaatcactctcaaatttaacccaagataagcaataggatttgggggtgacttgtacacatttctaacaacacttttcttttttctagaggtcactctcaaacactgatatatcactatagtttgagtgtanggattcagtaatcaaaggttgttattgcaaaagagccaggcag

SEQ ID NO: 746 - DNA, 524 bp, Homo sapien
  misc_feature (1)...(524): n = A,T,C or G
ctgtgaaattgggttgggagagccaaaatactttacaacttcagaccggagaaaaggccagaggtgtgaagttagactctatgatgaaacagagtcgtcttttgcgatgacatgttgggataatgaatccattctacttgcacagagctggatgccacgagaaacagtaatatttgcctcagatgtaagaataaattttgacaaatttcggaactgcatgacagcaactgtaatctcaaaaaccattattacaactaatccagatataccagaagctaacattctgctgaattttatacgagaaaataaagaaacaaatgttctggatgatgaaattgacagttatttcaaagaatccataaatttaagtacaatagttgatgtctacacagntgaacaattaaagggaaaagctttgaagaatgaaggaaaagctgatccttcctatggcatcctttatgcctacatttccacactcaacattgatgatgaaactcaaaagtagttcgaaatagatgttccag

SEQ ID NO: 747 - DNA, 456 bp, Homo sapien
  misc_feature (1)...(456): n = A,T,C or G
cctcagttcttgattgtggttgacggggcgtcaccatgaaggagcccatttagtataaagcttccaaccttttctcttaatcgtttctttaatcttttaaaccatcttcaagtgcataggggagtttccgatgccagaggatgaaagcaagtgctttctccaccctctcctcccagagtgaaaacaaatccttttgctgatacttgtttcaaaagcatccattgtaaagcttctcagtgacacaaaatactgagaggtaactttttatcaatcaaaccacataccccaatttaacacctttcagtgctctgaattcaactgacagactaaagggtgtttcctgtaacagtctgaaatattaagtgttttttttgttttgtttttaaatcttatttcagaaaacttcctctnggggtaggaaagtacacatgaagcagcaaagtaacgaagaaaaac

SEQ ID NO: 748 - DNA, 474 bp, Homo sapien
  misc_feature (1)...(474): n = A,T,C or G
ccanaccagggaaccaaatgcagacagngaagttctctgcttcttttggctataatgngacaagaaagggatcatcttttgaagatgtttaaagaaataaagcaactttctttataaacagtcaaataatcaattaatggaataaataagtactaacccacattttaaccactctgtaatcactacactttacatattttttatttnggnggcaaantcccccataattagtctaaaatccaccaatcacttttaaaagtaaaatgaatagccaccaaaataagaaaatcttctgttcactctttggctaaaaaggaaaacaaataaaacaaaacaaaaagaaacagaagacaactgtaacactggtgataaaagaaactttttttttacaagtaaaataaagttatcaatttaaatcttggncactttataaaaacaagaggtaatgttgtaataaaacagcagtagcctcag

SEQ ID NO: 749 - DNA, 355 bp, Homo sapien
  misc_feature (1)...(355): n = A,T,C or G
cctgggtnnagnggctgactgnaacctccacttcctgttctcaggcaatcctcctgcctcagcctccttagtagctgggactacaggagtgtgcaaccatgcccaactaatttttgtatttttaatagagacagggtttcaccatgttgatcaggttggtctccaactcctgacctcaggtgatccacctgtcccagcctcccaaagtgctgggattacaggcatgagccaccacgcccggnccaggataaagtaaaaatttgtaagcacacaaggccctttgcaacctggctcctggttactactttaancctcctgccctcccaaatgtnctcactgtttttctanacatacc

SEQ ID NO: 750 - DNA, 493 bp, Homo sapien
  misc_feature (1)...(493): n = A,T,C or G
ccatgctggtctcgaactcctgaactcaggtgatccacccgcctcagtctcccaatagattacatatattattaatgaattgcttcctttaacaccctattcattgaattttccagtaaaccacaattactaattactcctgaaatcagaaaagaggttaaaaagattttataacagtatcctatgaaatctactactttcaagtaatagtagttgaattaccaaaacccgtcactcaagccaatgactacaattaagatatgagtaacatttcctagataaataaagtcaattaattatatttgcatctgggaaatagagaaagtacatataagccatgattttgaagncaaaagagagagantatttgccaaggaggggtgagttatagtatgtaattataacatacagaagctttttgtatgctggtaactaattttaatttcctacattnttatggagatttctgctattcttgtcctattttccacct

SEQ ID NO: 751 - DNA, 364 bp, Homo sapien
  misc_feature (1)...(364): n = A,T,C or G
cgaggtctggnaaggtcaccaagtctgcccaganagctcagaaggctaaatgaatattatccctaatacctgccaccccactcttaatcagtggtggaagaacggtctcagaactgtttgtttcaattggccatttaagtttagtagtaaaagactggttaatgataacaatgcatcgtaaaaccttcagaaggaaaggagaatgttttgnggaccactttggttttcttttttgcgtgtggcagttttaagttattagtttttaaaatcagtactttttaatggaaacaacttgaccaaaaatttgtcacagaattttgagacccattaaaaaagttaaatgagataaaaaaaaaaaancntg

SEQ ID NO: 752 - DNA, 498 bp, Homo sapien
  misc_feature (1)...(498): n = A,T,C or G
ctggattatgggttggnattggtcatatgttagactccatacaggcatagctatgatgcagtgaatcccttagaagttacaattctcaaattacatacttcctcagatgtaacattagaactcaatatttctaacaataacataccagaaaaggctggactggcactcatctgctgactaacttgtagcctcagtaatatgacatacttgcctttaacaaattatctcaaattaactaacagaccttcagaaaatggagattctttttgatggggacataatcaaatttaagtctgagaaatatgcttaacagttggaactcaaattaaatgtactgattttaaagtttagacattaacaagtgatanattagcctcaaaaaaagacaatttggnaaggnttaggtcttttaatttggtgcttgntcacaacttgactggtgcttctttccttgctgcttcacatcaagcatggggccaattctattttcagtaaatg

SEQ ID NO: 753 - DNA, 467 bp, Homo sapien
  misc_feature (1)...(467): n = A,T,C or G
nacaaccttagccanaaccatttacccaaataaagggataggcgatagaaattgaaacctggcgcaatagatatagnaccgcaagggaaagatgaaaaattataaccaagcataatatagcaaggactaacccctataccttctgcataatgaattaactagaaataactttgcaaggagagccaaagctaagacccccgaaaccagacgagctatctaagaacagctaaaagagcacacccgtctatgtagcaaaatagtgggaagatttataggtagaggcgacaaacctaccgagcctggtgatagctggntgnccaagatagaatcttagntcaactttaaatttgcccacagaaccctctaaatccccttgtaaatttaactgttagtccaaagaggaacagctcttggacacnaggaaaaaaccttgcagagagagtaaaaaatttaacacccatagtagg

SEQ ID NO: 754 - DNA, 196 bp, Homo sapien
  misc_feature (1)...(196): n = A,T,C or G
gtcatgttcaagtgttntaatctgacgcaggcttatgcggaggagaatgttttcatgttacttatactaacattagttcttctatagggtgatagattggtccaattgggtgtgaggagttcagttatatgtttgggattttttaggcagtgggtgttgagcttgaacgctttcttaattggtggctgcttttagg

SEQ ID NO: 755 - DNA, 381 bp, Homo sapien
ctggaaaggattctgtacatataagacatcaaatattgagggatactggaacttttaaattaatgggcaaagaaagtcaacaaaggaagttcatatgaaatcaaactagtaatatgattacaaaaaaaaagtttaaaatttttcttggccccagtcttatcatttctgagccaaatacaattctatcgaaatcacctgaaactgaaatcaccattctaggctggttttcccataaagatggactgctccaaaaagaggaatcaagaaagaatttggctcacagtgaattattcactttgtcttagttaactaaaaataaaatctgactgttaactacagaaatcatttcaaattctgtggtgataataaagtaatgaccgc

SEQ ID NO: 756 - DNA, 341 bp, Homo sapien
  misc_feature (1)...(341): n = A,T,C or G
ggntataaacctattatttattgcagaactaataaaaaatccaaagccttgtatttgtacatctttattatctctaaagcactttcctcaacctaatttcagtttttacaattggtactcaagaaaatagagacagaaatcatttgattttgcccagaaaccatctgcttatatttataaggccacctaatttgaaatcacatatagaccaggcgcggtggctcacgcctgtaattccaacactttggaaggccaaggcaggtggatcacaaggtcaagagattgagaccatcttggccaacatggcgaaaccccgtctctaccaaaaatacaaaaatcag

SEQ ID NO: 757 - DNA, 479 bp, Homo sapien
  misc_feature (1)...(479): n = A,T,C or G
cgcnttactgtacatattgctagcagggagacaactggaaatactaaacaaatactggaattcacattacagacagacgaaaccaacatggatgccacacataacttcctttgtagtttcacagagagcctatttgtggttgctcaggtggggtcatacattgcttgcagaaatggcctgatcatagctctatgaaacaatgaattcggaatgaaatcttaccatgacacctctctgtaggaaagaaatgttgcttcacgtgtgctaagttgagataataatatttcacatatttatatacagagaatcactctcaaatttaacccaagataagcaataggatttgggggtgacttgtncacatttctaacaacacttttcttttttctagaggtcactctcaaacactgatatatcactatagnttgagngtagggattcaagtaatcaaaggttgttattgcaaaagagccaggcag

SEQ ID NO: 758 - DNA, 267 bp, Homo sapien
  misc_feature (1)...(267): n = A,T,C or G
ccatgnctaggtttatagatagttgggtgggttggtgtaaatgagtgaggcaggagtccgaggaggttagttgtggcaataaaaatgattaaggatactagtataagagatcaggttcgtcctttagtgttgtgtatggctatcatttgttttgaggttagtttgactagtcattgttgggtggtaattagtcggttgttgatgagatatttggaggtggggatcaatagagggggaaatagaatgatcagtactgcggcgggtagg

SEQ ID NO: 759 - DNA, 449 bp, Homo sapien
  misc_feature (1)...(449): n = A,T,C or G
cgaggtcttgaaatcagcaacacacttacaaatgagaaaatgaaaatagaagagtatataaagaaagggaaagaggattatgaagagagtcatcagagagctgtggctgcagaggtatccgtacttgaaaactggaaggagagtgaagtgtataagctacagatcatggagtcacaagcagaagcctttctgaagaagctggggctgattagccgtgatcctgcagcatatcccgacatggagtctgatatacgttcatgggaattgtttctttctaatgttacaaaagaaattgagaaagcaaagtctcagtttgaagaacaaattaaggcaattaaaaatggttcccggctcagtgaactttctaaagngcagatttctgagctttcatttcctgcctgtaacacggttcatcccgagttactccctgagtcttcaggccacgatgg

SEQ ID NO: 760 - DNA, 414 bp, Homo sapien
  misc_feature (1)...(414): n = A,T,C or G
ccatnaactggaagcagctcactaaacaaacagnggcatacccatagaactgcatacttctcagcagtatgaaagaatgagctacttatataagcatcattgataaacctcaaaaaaaaaatgccacatgaagaancccaagggggagaaacataaaaactttatatgncagncatataaaattctagaaaatgcaaactaatccatcntaaaggaaagtaaatcancagttgtctggaggaccanagagagcaggaggagagagattnttaanggggttaaagtaaattngggagtgcccttccatttttaaatnctatgaaaatgaaagtaaaggcccntgcatgttgtaaactaatagtaacaaacagattgggttggagtggggtgttgtctggggacatcattacaaan

SEQ ID NO: 761 - DNA, 428 bp, Homo sapien
gagcctcactaaaataacagatttcagtatagccaagttcatcagaaagactcaaatggaatgatttacaagatagaacactttaaaccaggtcagtcctatctttttgtagctgaaggctatcagtcataacacaatttcgcgtacacctctgctcattatggaattacacttaaaacgaatctcaagagggtgaccattgttgtttcagataccatccctaaggagagtggttaacaggaagattgccagtgttactgatggaaagaagtgtttgtttgttttttttcttgtcaaagacttacaccatagttttaaattaaactgtcaggcattttctcagacaggttttccttttcaatgcagtaatgaagaactaagataaaaatcatgacttttgactgccactcaacattattacatgcacc

SEQ ID NO: 762 - DNA, 574 bp, Homo sapien
  misc_feature (1)...(574): n = A,T,C or G
caggtctgaactgataagtattaagagacgtttgttgctagttaagngttccagttgagagttcgaagtgaaaacctgggctctttaccagtgttgagtgagaagatttatttctctttcctctgaatttaccacatgtaacatcacagagacatgtagagttcctttaggatttgcgatttgaaccagnccagtctgattttcaggtgaattctgtgaagagcttgatgggggaagtctgaagacagaaggaattagggaaaagggtgatacttacagagtaaaggaaataaatgaaaagataatggtatttttggtagccacagggaaatagcaggaggggactggagatcacacacacgcacacgcacacacacaaacacacacacacgctaaaactcaaactaaaaacctcccaaaggagctgctttgtttgcagacttcaattngaagtagatactaagggcaagaatagaccagttaaaattcacctgaaaatctcttcccanncttcaaatgtgctaaaatatcactgtcagcttagcatctctncatgtatgtatatatagatgta

SEQ ID NO: 763 - DNA, 465 bp, Homo sapien
  misc_feature (1)...(465): n = A,T,C or G
cctactatgggtgttaaaattttttactctctctacaaggntttttcctagtgtccaaagagctgttcctctttggactaacagttaaatttacaaggggatttagagggttctgngggcaaatttaaagttgaactaagattctatcttggacaaccagctatcaccaggctcggtaggtttgtcgcctctacctataaatcttcccactattttgctacatagacgggtgtgctcttttagctgttcttaggtagctcgtctggtttcgggggtcttagctttggctctccttgcaaagttatttctagttaattcattatgcagaaggtataggggttagtccttgctatattatgcttggatataatttttcatctttcccttgcggtactatatctattgcgccangtttcaatttctatcgcctatactttatttgggtaaatggtttggctaaggttg

SEQ ID NO: 764 - DNA, 151 bp, Homo sapien
ctgtcaattaatgctagtcctcaggatttaaaaaataatcttaactcaaagtccaatgcaaaaacattaagttggtaattactcttgatcttgaattacttccgttacgaaagtccttcacatttttcaaactaagctactatatttaagg

SEQ ID NO: 765 - DNA, 251 bp, Homo sapien
gaagagcttatcacctttcatgatcacgccctcatagtcattttccttatctgcttcctagtcctgtatgcccttttcctaacactcacaacaaaactaactaatactaacatctcagacgctcaggaaatagtaaccgtctgaactatcctgcccgccatcatcctagtcctcatcgccctcccatccctacgcatcctttacataacagacgaggtcaacgatccctcccttaccatcaaatcaattgg

SEQ ID NO: 766 - DNA, 375 bp, Homo sapien
  misc_feature (1)...(375): n = A,T,C or G
cgaggtctgncctcctggttcttcatccattattaacagaagagcatactggtttcggtccataaaatctttgggaagggacaactgtaaaggaagttcatagtcgtcaatatgaaggattttaatttctggctttcctatcttcttcttcaggatagcttccttcagcatagaattgttttccaatataaaatattttgctgggttgtccgtactatgtaggctgaccactgggacccttggaccttcacagaataataagaaatgttgattcatgggactaaaactggcatcaaaatatgtacattgttctttcatgaaattacatgaaatgcattggcgattcaataatccttcagtagaagcactgtacag

SEQ ID NO: 767 - DNA, 485 bp, Homo sapien
  misc_feature (1)...(485): n = A,T,C or G
cgaggtctgaaccctcgtggagccattcatacaggtccctaattaaggaacaagtgattatgctaccttngcacggttagggtaccgcggcccgttaaacatgtgtcactgggcaggcggtgcctctaatactggtgatgctagaggtgatgtttttggnaaacaggcggggtaagatttgccgagttccttttactttttttaacctttccttatgagcatgcctgtgttgggttgacagtgagggtaataatgacttgttggtgattgtagatattgggctgttaattgtcagttcagtgttttaatctgacgcaggcttatgcggaggagaatgttttcatgttacttatactaacattagttcttctatagggtgatagatnggtccaattgggtgtgaggagntcacttatatgtttgggattttttaggtaagngggtgttgagcttgaacgctttcttaattgggggctgcttttang

SEQ ID NO: 768 - DNA, 379 bp, Homo sapien
  misc_feature (1)...(379): n = A,T,C or G
ctgatattctattaaagatacaaagaggagctggnaccatttcttctgaaactattacaaacaactgaaaaggtggaatttctccctaattcattttaggaggccagcattatactgataccaaaacctggcagaggtacaataataaaaggaaacttcaagtcagtatcactgatgaacaccaatgtgaaaatcctcaataaaatactggcaaactgaattcagcagcacatcaaaaagctaatccaccacaatcaagtcagcttcatccctgcgatgcaagtctggttcaacatatgcaaatcaataaatacaattcatcagataaacagagctaaagacaaaattcacatgattttctcaatagatgcagaaaagg

SEQ ID NO: 769 - DNA, 518 bp, Homo sapien
  misc_feature (1)...(518): n = A,T,C or G
cgaggtccatatgatgatcagtctatatagtttaaggcgcagatacacaaattttcaaaaatatgggtagaatatagtcaatatgaatggaatagacaatgctttgaaaatcactggagggaggctttattgtttgtgaaaacatgttgtcatcactttttgctttaagcccttggtggtgaaataactcaaaccattcttccttatgctgaagatcgagaaccccaagtatcacatctaccatcccactcatcaatgtgattggtcagtctttgctgaggncctgcatagccagttttaaagttagagttcttgcatatacatatgaaaaggcatgttacttgtgctttcaaagagctttttgcttggtgtaaaaagaaaactcaaattacagtgtgatgtggaatataatggtggtagtttcatcgagatgatgggaaagaattgataagataaagcngaaagatgagcagaattttcagattgggtntggaaagagcacttaagaaagagggtgg

SEQ ID NO: 770 - DNA, 378 bp, Homo sapien
  misc_feature (1)...(378): n = A,T,C or G
tatgggtcctgagtgtggaatataagataacaagacaattcccttgctttcaagggaaatcacactttataaaactttgaattcttgaaatgggtttcagaggttccaaggtcaaattcaagaataagagttaagaagaaaaagactatgagaaaggaagtgntgaccccatttgcatttaaatggcaggaatagtctcaatctactcattggggaaaaatgtatgttgcatatttttgagatattgcaacttgctctctctctttgccaccccaccctttgncatgctctgtttttgggctgaattggcaagaaaaatggctggagggctggaagaagntggacccttcttccttcttccttcttccttctttctcc

SEQ ID NO: 771 - DNA, 207 bp, Homo sapien
cataaatattatactagcatttaccatctcacttctaggaatactagtatatcgctcacacctcatatcctccctactatgcctagaaggaataatactatcactgttcattatagctactctcataaccctcaacacccactccctcttagccaatattgtgcctattgccatactagtctttgccgcctgcgaagcagcggtagg

SEQ ID NO: 772 - DNA, 384 bp, Homo sapien
  misc_feature (1)...(384): n = A,T,C or G
cctactatgggtgttaaattttttactctctctacaaggttttttcctagtgtccaaagagctgttcctctttggactaacagttaaatttacaaggggatttagagggttctgngggcaaatttaaagttgaactaagattctatcttggacaaccagctatcaccaggctcggtaggtttgtcgcctctacctataaatcttcccactattttgctacatagacgggtgtgctcttttagctgttcttaggtagctcgtctggtttcgggggtcttagctttggctctccttgcaaagttatttctagttaattcattatgcagaaggtataggggttagtccttgctatattatgcttggttataatttttcatctttccc

SEQ ID NO: 773 - DNA, 182 bp, Homo sapien
cccttttcctaacactcacaacaaaactaactaatactaacatctcagacgctcagggaaatagaaaccgtctgaactatcctgcccgccatcatcctagtcctcatcgccctcccatccctacgcatcctttacataacagacgaggtcaacgatccctcccttaccatcaaatcaattgg

SEQ ID NO: 774 - DNA, 191 bp, Homo sapien
ccatggctaggtttatagatagttgggtggttgggtgtaaatgagtgaggcaggagtccgaggaggttagttgtggcaataaaaatgattaaggatactagtataagagatcaggttcgtcctttagtgttgtgtatggctatcatttgttttgaggttagtttgattagtcattgttgggtggtaattag

SEQ ID NO: 775 - DNA, 192 bp, Homo sapien
  misc_feature (1)...(192): n = A,T,C or G
ccatggctaagntatatagatagctgggtggctggagtaaatgantgaggnacgagtccgangaggttagttgaggcaataaaaatgatnaaggatactagtataagagatcangttcgtcctttacatgttgngtatggctatcatttgttttgaggctagnttgattagtcattgttgggtggtaattaa

SEQ ID NO: 776 - DNA, 144 bp, Homo sapien
ctgaccccctagaaccctggctctgccattagctaggacctaagactctgcccacattttggtctgttctctcccattacacataggtttgtctcagcatgcaagagtttttcctttaaaaaaaaaaaaaaaaaaaaaaaaaaa

SEQ ID NO: 777 - DNA, 483 bp, Homo sapien
  misc_feature (1)...(483): n = A,T,C or G
cctactatgggtgntaaattttttactctctctacaaggttttttcctagtgtccaaagagctgttcctctttggactaacagttaagtttacaaggggatttagagggttctgtgggcaaatttaaagttgaactaagattctatcttggacaaccagctatcaccaggctcggtaggtttgtcgcctctacctataaatcttcccactattttgctacatagacgggtgtgctcttttagctgttcttaggtagctcgtctggtttcgggggtcttagctttggctctccttgcaaagttatttctagttaattcattatgcagaaggtataggggntaagtccttgctatattatgcttggatataatttttcatctttcccttgcggtactatatctattgcgccaggtttcaatttctgccgcctatactttatttgggtaaatggtttggctaangttgctggtagaaggtggagtg

SEQ ID NO: 778 - DNA, 393 bp, Homo sapien
  misc_feature (1)...(393): n = A,T,C or G
ctgcatttttattgcgatctgcagatgaactgggaaaatctcattttacaacagaactgagacagacgaccaccatattcactgaggtctaaatttgcagtttccactaatgacattttgatttcccaacagagatacttctggtcttactgcacagtcttttaagagaaatacttccattatgccacattgtccttgatccgtaagtgatgtgttaaggtgcttcaaaggaactctgacctctgaagtacttgagctactttagtatgtccagcctattgctttttgttttagngngtcaccataaatatcaggggcataaaaggctatctattcttaattcaaggataaaacagaagaagcttgtggnataaaacaatagtcaagatccag

SEQ ID NO: 779 - DNA, 277 bp, Homo sapien
  misc_feature (1)...(277): n = A,T,C or G
cctnttgatttgatgggtaaggggagggatcgttgacctcgtctgttatgtaaaggatgcgtagggatgggagggcgatgaggactaggatgatggcgggcaggatagttcagacggtttctatttcctgagcgtctgagatgttagtattagttagttttgttgtgagtgttaggaaaagggcatacaggactaggaagcagataaggaaaatgactatgagggcgtgatcatgaaaggtgataagctcttctatgataggggaagtagcgtcttg

SEQ ID NO: 780 - DNA, 328 bp, Homo sapien
  misc_feature (1)...(328): n = A,T,C or G
catgntatggataaccatnttaactgtattttntgcancccgtaccttcttgggaatacaattgtctaactttttatttttggnctggctgttgtggtgtgcaaaactccgtacattgctattttgccacactgcaacaccttacagatgtggaagatgtgaaatttgtcatcaattatgactaccctaactcctcagaggattatattcatcgaattggaagaactgctcgcagtaccaaaacaggcacagcatacactttctttacacctaataacataaagcaggggagcgaccttatctctgtgcttcgggaagctaancaaac

SEQ ID NO: 781 - DNA, 305 bp, Homo sapien
  misc_feature (1)...(305): n = A,T,C or G
ctgttcagaaagctcattggacctggttttgaaaataaaacaaagttaaaaccctgggaggagttattgtgcagngtggagtactcaggctttcttataaagaaaaaaaaagttatctggtaccaaagtgtgcaacctacagaccctcaggtactgccctgtgacttctctgtatgacatcacaaggctgccaagtgcctgtttttctagaactaggagttggtgaggtttggctantgctgaaaccatgcataggattggtttactaaattaaaaccttattacgtacgtcctccaaaagacag

SEQ ID NO: 782 - DNA, 497 bp, Homo sapien
  misc_feature (1)...(497): n = A,T,C or G
cgaggtggctttaattgatgttaatgccttatgtcaaatgtaaagttagaatttgctagggctgggatagggagtgatatttctaggacttagacattgaaaactaattcagcctgtagtaacctggatggttttcaatggcatggttagtcaaattcatggttttaaacttagaagcagctttcgggggagagggtaggttggagcatttattacatattttactgtttaatgtcttaaccgtgggccttttaatttgtaaacactgaaatgattgttgggctgtggaaaacatttacctatttaccttggaagttttaaaagacagtccactttttagcatgtgtgttgcgtccagcctgtggtcgtcttaactaataaatgngatttttctctcaaaaaaaaaacctccccgggcggccgctcaagggcnaattccncacactggcggccgttactaggggatccganctcggtccaagcttggcgtaatcatg

SEQ ID NO: 783 - protein, 364 aa, Homo sapien
MWQPLFFKWLLSCCPGSSQIAAAASTQPEDDINTQRKKSQEKMREVTDSPGRPRELTIPQTSSHGANRFVPKSKALEAVKLAIEAGFHHIDSAHVYNNEEQVGLAIRSKIADGSVKREDIFYTSKLWSNSHRPELVRPALERSLKNLQLDYVDLYLIHFPVSVKPGEEVIPKDENGKILFDTVDLCATWEAMEKCKDAGLAKSIGVSNFNHRLLEMILNKPGLKYKPVCNQVECHPYFNQRKLLDFCKSKDIVLVAYSALGSHREEPWVDPNSPVLLEDPVLCALAKKHKRTPALIALRYQLQRGVVVLAKSYNEQRIRQNVQVFEFQLTSEEMKAIDGLNRNVRYLTLDIFAGPPNYPFSDEY

SEQ ID NO: 784 - DNA, 6353 bp, Homo sapien
tggcgaatgggacgcgccctgtagcggcgcattaagcgcggcgggtgtggtggttacgcgcagcgtgaccgctacacttgccagcgccctagcgcccgctcctttcgctttcttcccttcctttctcgccacgttcgccggctttccccgtcaagctctaaatcgggggctccctttagggttccgatttagtgctttacggcacctcgaccccaaaaaacttgattagggtgatggttcacgtagtgggccatcgccctgatagacggtttttcgccctttgacgttggagtccacgttctttaatagtggactcttgttccaaactggaacaacactcaaccctatctcggtctattcttttgatttataagggattttgccgatttcggcctattggttaaaaaatgagctgatttaacaaaaatttaacgcgaattttaacaaaatattaacgtttacaatttcaggtggcacttttcggggaaatgtgcgcggaacccctatttgtttatttttctaaatacattcaaatatgtatccgctcatgaattaattcttagaaaaactcatcgagcatcaaatgaaactgcaatttattcatatcaggattatcaataccatatttttgaaaaagccgtttctgtaatgaaggagaaaactcaccgaggcagttccataggatggcaagatcctggtatcggtctgcgattccgactcgtccaacatcaatacaacctattaatttcccctcgtcaaaaataaggttatcaagtgagaaatcaccatgagtgacgactgaatccggtgagaatggcaaaagtttatgcatttctttccagacttgttcaacaggccagccattacgctcgtcatcaaaatcactcgcatcaaccaaaccgttattcattcgtgattgcgcctgagcgagacgaaatacgcgatcgctgttaaaaggacaattacaaacaggaatcgaatgcaaccggcgcaggaacactgccagcgcatcaacaatattttcacctgaatcaggatattcttctaatacctggaatgctgttttcccggggatcgcagtggtgagtaaccatgcatcatcaggagtacggataaaatgcttgatggtcggaagaggcataaattccgtcagccagtttagtctgaccatctcatctgtaacatcattggcaacgctacctttgccatgtttcagaaacaactctggcgcatcgggcttcccatacaatcgatagattgtcgcacctgattgcccgacattatcgcgagcccatttatacccatataaatcagcatccatgttggaatttaatcgcggcctagagcaagacgtttcccgttgaatatggctcataacaccccttgtattactgtttatgtaagcagacagttttattgttcatgaccaaaatcccttaacgtgagttttcgttccactgagcgtcagaccccgtagaaaagatcaaaggatcttcttgagatcctttttttctgcgcgtaatctgctgcttgcaaacaaaaaaaccaccgctaccagcggtggtttgtttgccggatcaagagctaccaactctttttccgaaggtaactggcttcagcagagcgcagataccaaatactgtccttctagtgtagccgtagttaggccaccacttcaagaactctgtagcaccgcctacatacctcgctctgctaatcctgttaccagtggctgctgccagtggcgataagtcgtgtcttaccgggttggactcaagacgatagttaccggataaggcgcagcggtcgggctgaacggggggttcgtgcacacagcccagcttggagcgaacgacctacaccgaactgagatacctacagcgtgagctatgagaaagcgccacgcttcccgaagggagaaaggcggacaggtatccggtaagcggcagggtcggaacaggagagcgcacgagggagcttccagggggaaacgcctggtatctttatagtcctgtcgggtttcgccacctctgacttgagcgtcgatttttgtgatgctcgtcaggggggcggagcctatggaaaaacgccagcaacgcggcctttttacggttcctggccttttgctggccttttgctcacatgttctttcctgcgttatcccctgattctgtggataaccgtattaccgcctttgagtgagctgataccgctcgccgcagccgaacgaccgagcgcagcgagtcagtgagcgaggaagcggaagagcgcctgatgcggtattttctccttacgcatctgtgcggtatttcacaccgcatatatggtgcactctcagtacaatctgctctgatgccgcatagttaagccagtatacactccgctatcgctacgtgactgggtcatggctgcgccccgacacccgccaacacccgctgacgcgccctgacgggcttgtctgctcccggcatccgcttacagacaagctgtgaccgtctccgggagctgcatgtgtcagaggttttcaccgtcatcaccgaaacgcgcgaggcagctgcggtaaagctcatcagcgtggtcgtgaagcgattcacagatgtctgcctgttcatccgcgtccagctcgttgagtttctccagaagcgttaatgtctggcttctgataaagcgggccatgttaagggcggttttttcctgtttggtcactgatgcctccgtgtaagggggatttctgttcatgggggtaatgataccgatgaaacgagagaggatgctcacgatacgggttactgatgatgaacatgcccggttactggaacgttgtgagggtaaacaactggcggtatggatgcggcgggaccagagaaaaatcactcagggtcaatgccagcgcttcgttaatacagatgtaggtgttccacagggtagccagcagcatcctgcgatgcagatccggaacataatggtgcagggcgctgacttccgcgtttccagactttacgaaacacggaaaccgaagaccattcatgttgttgctcaggtcgcagacgttttgcagcagcagtcgcttcacgttcgctcgcgtatcggtgattcattctgctaaccagtaaggcaaccccgccagcctagccgggtcctcaacgacaggagcacgatcatgcgcacccgtggggccgccatgccggcgataatggcctgcttctcgccgaaacgtttggtggcgggaccagtgacgaaggcttgagcgagggcgtgcaagattccgaataccgcaagcgacaggccgatcatcgtcgcgctccagcgaaagcggtcctcgccgaaaatgacccagagcgctgccggcacctgtcctacgagttgcatgataaagaagacagtcataagtgcggcgacgatagtcatgccccgcgcccaccggaaggagctgactgggttgaaggctctcaagggcatcggtcgagatcccggtgcctaatgagtgagctaacttacattaattgcgttgcgctcactgcccgctttccagtcgggaaacctgtcgtgccagctgcattaatgaatcggccaacgcgcggggagaggcggtttgcgtattgggcgccagggtggtttttcttttcaccagtgagacgggcaacagctgattgcccttcaccgcctggccctgagagagttgcagcaagcggtccacgctggtttgccccagcaggcgaaaatcctgtttgatggtggttaacggcgggatataacatgagctgtcttcggtatcgtcgtatcccactaccgagatatccgcaccaacgcgcagcccggactcggtaatggcgcgcattgcgcccagcgccatctgatcgttggcaaccagcatcgcagtgggaacgatgccctcattcagcatttgcatggtttgttgaaaaccggacatggcactccagtcgccttcccgttccgctatcggctgaatttgattgcgagtgagatatttatgccagccagccagacgcagacgcgccgagacagaacttaatgggcccgctaacagcgcgatttgctggtgacccaatgcgaccagatgctccacgcccagtcgcgtaccgtcttcatgggagaaaataatactgttgatgggtgtctggtcagagacatcaagaaataacgccggaacattagtgcaggcagcttccacagcaatggcatcctggtcatccagcggatagttaatgatcagcccactgacgcgttgcgcgagaagattgtgcaccgccgctttacaggcttcgacgccgcttcgttctaccatcgacaccaccacgctggcacccagttgatcggcgcgagatttaatcgccgcgacaatttgcgacggcgcgtgcagggccagactggaggtggcaacgccaatcagcaacgactgtttgcccgccagttgttgtgccacgcggttgggaatgtaattcagctccgccatcgccgcttccactttttcccgcgttttcgcagaaacgtggctggcctggttcaccacgcgggaaacggtctgataagagacaccggcatactctgcgacatcgtataacgttactggtttcacattcaccaccctgaattgactctcttccgggcgctatcatgccataccgcgaaaggttttgcgccattcgatggtgtccgggatctcgacgctctcccttatgcgactcctgcattaggaagcagcccagtagtaggttgaggccgttgagcaccgccgccgcaaggaatggtgcatgcaaggagatggcgcccaacagtcccccggccacggggcctgccaccatacccacgccgaaacaagcgctcatgagcccgaagtggcgagcccgatcttccccatcggtgatgtcggcgatataggcgccagcaaccgcacctgtggcgccggtgatgccggccacgatgcgtccggcgtagaggatcgagatctcgatcccgcgaaattaatacgactcactataggggaattgtgagcggataacaattcccctctagaaataattttgtttaactttaagaaggagatatacatatgcagcatcaccaccatcaccactggcagcccctcttcttcaagtggctcttgtcctgttgccctgggagttctcaaattgctgcagcagcctccacccagcctgaggatgacatcaatacacagaggaagaagagtcaggaaaagatgagagaagttacagactctcctgggcgaccccgagagcttaccattcctcagacttcttcacatggtgctaacagatttgttcctaaaagtaaagctctagaggccgtcaaattggcaatagaagccgggttccaccatattgattctgcacatgtttacaataatgaggagcaggttggactggccatccgaagcaagattgcagatggcagtgtgaagagagaagacatattctacacttcaaagctttggagcaattcccatcgaccagagttggtccgaccagccttggaaaggtcactgaaaaatcttcaattggactatgttgacctctatcttattcattttccagtgtctgtaaagccaggtgaggaagtgatcccaaaagatgaaaatggaaaaatactatttgacacagtggatctctgtgccacatgggaggccatggagaagtgtaaagatgcaggattggccaagtccatcggggtgtccaacttcaaccacaggctgctggagatgatcctcaacaagccagggctcaagtacaagcctgtctgcaaccaggtggaatgtcatccttacttcaaccagagaaaactgctggatttctgcaagtcaaaagacattgttctggttgcctatagtgctctgggatcccatcgagaagaaccatgggtggacccgaactccccggtgctcttggaggacccagtcctttgtgccttggcaaaaaagcacaagcgaaccccagccctgattgccctgcgctaccagctgcagcgtggggttgtggtcctggccaagagctacaatgagcagcgcatcagacagaacgtgcaggtgtttgaattccagttgacttcagaggagatgaaagccatagatggcctaaacagaaatgtgcgatatttgacccttgatatttttgctggcccccctaattatccattttctgatgaatattaatgactcgagcaccaccaccaccaccactgagatccggctgctaacaaagcccgaaaggaagctgagttggctgctgccaccgctgagcaataactagcataaccccttggggcctctaaacgggtcttgaggggttttttgctgaaaggaggaactatatccggat

SEQ ID NO: 785 - DNA, 5502 bp, Homo sapien
tggcgaatgggacgcgccctgtagcggcgcattaagcgcggcgggtgtggtggttacgcgcagcgtgaccgctacacttgccagcgccctagcgcccgctcctttcgctttcttcccttcctttctcgccacgttcgccggctttccccgtcaagctctaaatcgggggctccctttagggttccgatttagtgctttacggcacctcgaccccaaaaaacttgattagggtgatggttcacgtagtgggccatcgccctgatagacggtttttcgccctttgacgttggagtccacgttctttaatagtggactcttgttccaaactggaacaacactcaaccctatctcggtctattcttttgatttataagggattttgccgatttcggcctattggttaaaaaatgagctgatttaacaaaaatttaacgcgaattttaacaaaatattaacgtttacaatttcaggtggcacttttcggggaaatgtgcgcggaacccctatttgtttatttttctaaatacattcaaatatgtatccgctcatgaattaattcttagaaaaactcatcgagcatcaaatgaaactgcaatttattcatatcaggattatcaataccatatttttgaaaaagccgtttctgtaatgaaggagaaaactcaccgaggcagttccataggatggcaagatcctggtatcggtctgcgattccgactcgtccaacatcaatacaacctattaatttcccctcgtcaaaaataaggttatcaagtgagaaatcaccatgagtgacgactgaatccggtgagaatggcaaaagtttatgcatttctttccagacttgttcaacaggccagccattacgctcgtcatcaaaatcactcgcatcaaccaaaccgttattcattcgtgattgcgcctgagcgagacgaaatacgcgatcgctgttaaaaggacaattacaaacaggaatcgaatgcaaccggcgcaggaacactgccagcgcatcaacaatattttcacctgaatcaggatattcttctaatacctggaatgctgttttcccggggatcgcagtggtgagtaaccatgcatcatcaggagtacggataaaatgcttgatggtcggaagaggcataaattccgtcagccagtttagtctgaccatctcatctgtaacatcattggcaacgctacctttgccatgtttcagaaacaactctggcgcatcgggcttcccatacaatcgatagattgtcgcacctgattgcccgacattatcgcgagcccatttatacccatataaatcagcatccatgttggaatttaatcgcggcctagagcaagacgtttcccgttgaatatggctcataacaccccttgtattactgtttatgtaagcagacagttttattgttcatgaccaaaatcccttaacgtgagttttcgttccactgagcgtcagaccccgtagaaaagatcaaaggatcttcttgagatcctttttttctgcgcgtaatctgctgcttgcaaacaaaaaaaccaccgctaccagcggtggtttgtttgccggatcaagagctaccaactctttttccgaaggtaactggcttcagcagagcgcagataccaaatactgtccttctagtgtagccgtagttaggccaccacttcaagaactctgtagcaccgcctacatacctcgctctgctaatcctgttaccagtggctgctgccagtggcgataagtcgtgtcttaccgggttggactcaagacgatagttaccggataaggcgcagcggtcgggctgaacggggggttcgtgcacacagcccagcttggagcgaacgacctacaccgaactgagatacctacagcgtgagctatgagaaagcgccacgcttcccgaagggagaaaggcggacaggtatccggtaagcggcagggtcggaacaggagagcgcacgagggagcttccagggggaaacgcctggtatctttatagtcctgtcgggtttcgccacctctgacttgagcgtcgatttttgtgatgctcgtcaggggggcggagcctatggaaaaacgccagcaacgcggcctttttacggttcctggccttttgctggccttttgctcacatgttctttcctgcgttatcccctgattctgtggataaccgtattaccgcctttgagtgagctgataccgctcgccgcagccgaacgaccgagcgcagcgagtcagtgagcgaggaagcggaagagcgcctgatgcggtattttctccttacgcatctgtgcggtatttcacaccgcatatatggtgcactctcagtacaatctgctctgatgccgcatagttaagccagtatacactccgctatcgctacgtgactgggtcatggctgcgccccgacacccgccaacacccgctgacgcgccctgacgggcttgtctgctcccggcatccgcttacagacaagctgtgaccgtctccgggagctgcatgtgtcagaggttttcaccgtcatcaccgaaacgcgcgaggcagctgcggtaaagctcatcagcgtggtcgtgaagcgattcacagatgtctgcctgttcatccgcgtccagctcgttgagtttctccagaagcgttaatgtctggcttctgataaagcgggccatgttaagggcggttttttcctgtttggtcactgatgcctccgtgtaagggggatttctgttcatgggggtaatgataccgatgaaacgagagaggatgctcacgatacgggttactgatgatgaacatgcccggttactggaacgttgtgagggtaaacaactggcggtatggatgcggcgggaccagagaaaaatcactcagggtcaatgccagcgcttcgttaatacagatgtaggtgttccacagggtagccagcagcatcctgcgatgcagatccggaacataatggtgcagggcgctgacttccgcgtttccagactttacgaaacacggaaaccgaagaccattcatgttgttgctcaggtcgcagacgttttgcagcagcagtcgcttcacgttcgctcgcgtatcggtgattcattctgctaaccagtaaggcaaccccgccagcctagccgggtcctcaacgacaggagcacgatcatgcgcacccgtggggccgccatgccggcgataatggcctgcttctcgccgaaacgtttggtggcgggaccagtgacgaaggcttgagcgagggcgtgcaagattccgaataccgcaagcgacaggccgatcatcgtcgcgctccagcgaaagcggtcctcgccgaaaatgacccagagcgctgccggcacctgtcctacgagttgcatgataaagaagacagtcataagtgcggcgacgatagtcatgccccgcgcccaccggaaggagctgactgggttgaaggctctcaagggcatcggtcgagatcccggtgcctaatgagtgagctaacttacattaattgcgttgcgctcactgcccgctttccagtcgggaaacctgtcgtgccagctgcattaatgaatcggccaacgcgcggggagaggcggtttgcgtattgggcgccagggtggtttttcttttcaccagtgagacgggcaacagctgattgcccttcaccgcctggccctgagagagttgcagcaagcggtccacgctggtttgccccagcaggcgaaaatcctgtttgatggtggttaacggcgggatataacatgagctgtcttcggtatcgtcgtatcccactaccgagatatccgcaccaacgcgcagcccggactcggtaatggcgcgcattgcgcccagcgccatctgatcgttggcaaccagcatcgcagtgggaacgatgccctcattcagcatttgcatggtttgttgaaaaccggacatggcactccagtcgccttcccgttccgctatcggctgaatttgattgcgagtgagatatttatgccagccagccagacgcagacgcgccgagacagaacttaatgggcccgctaacagcgcgatttgctggtgacccaatgcgaccagatgctccacgcccagtcgcgtaccgtcttcatgggagaaaataatactgttgatgggtgtctggtcagagacatcaagaaataacgccggaacattagtgcaggcagcttccacagcaatggcatcctggtcatccagcggatagttaatgatcagcccactgacgcgttgcgcgagaagattgtgcaccgccgctttacaggcttcgacgccgcttcgttctaccatcgacaccaccacgctggcacccagttgatcggcgcgagatttaatcgccgcgacaatttgcgacggcgcgtgcagggccagactggaggtggcaacgccaatcagcaacgactgtttgcccgccagttgttgtgccacgcggttgggaatgtaattcagctccgccatcgccgcttccactttttcccgcgttttcgcagaaacgtggctggcctggttcaccacgcgggaaacggtctgataagagacaccggcatactctgcgacatcgtataacgttactggtttcacattcaccaccctgaattgactctcttccgggcgctatcatgccataccgcgaaaggttttgcgccattcgatggtgtccgggatctcgacgctctcccttatgcgactcctgcattaggaagcagcccagtagtaggttgaggccgttgagcaccgccgccgcaaggaatggtgcatgcaaggagatggcgcccaacagtcccccggccacggggcctgccaccatacccacgccgaaacaagcgctcatgagcccgaagtggcgagcccgatcttccccatcggtgatgtcggcgatataggcgccagcaaccgcacctgtggcgccggtgatgccggccacgatgcgtccggcgtagaggatcgagatctcgatcccgcgaaattaatacgactcactataggggaattgtgagcggataacaattcccctctagaaataattttgtttaactttaagaaggagatatacatatgcagcatcaccaccatcaccactggcagcccctcttcttcaagtggctcttgtcctgttgccctgggagttctcaaattgctgcagcagcctccacccagcctgaggatgacatcaatacacagaggaagaagagtcaggaaaagatgagagaagttacagactctcctgggcgaccccgagagcttaccattcctcagacttcttcacatggtgctaacagatttgtttgatgaattctgcagatatccatcacactggcggccgctcgagcaccaccaccaccaccactgagatccggctgctaacaaagcccgaaaggaagctgagttggctgctgccaccgctgagcaataactagcataaccccttggggcctctaaacgggtcttgaggggttttttgctgaaaggaggaactatatccggat
